United States Patent Application Publication US 2024/0352428 A1 - sequence listing, part 2

SEQ ID NO: 62 - DNA, 94611 bp, synthetic construct
  source 1..94611: mol_type = other DNA
gcttacatccgctcccattttgcaatggaaattgcatacagttcatcatgcgcttcaaaagtgacttcactttgcatgcggatgcatgctatagtataccctgtgatagctccgctatcccgttttgcatggcacacgaattgcataagcatgacaagggtaaccctcgaaagcggagctttcaaagtgtaggctgagtgtgggctctacctctattatatttgcgaccggaagtagtgacactgaaaacgttgactctagcccagtaaatacgttaaactaaaaggttgatagctgccgctatcgagtaaccaacattcacacaaggaggcacaatgacaagcaacaatcatgccaagattcacatccattacgctaagcaaatctactacgccatgcgtaaacgtgccatcgcaagcgatgagatatgcaaggaatgggccaagcccaagacaggctttgaagcgttctatgattgggtggtgaatgtgtcagggtacgccgtaggctaccgcctagacaggaatatcctcttcccgggaaacaagctctatgctccgcatacatgtgagttcacacctacatacatgcatactctattcaccaactgcgacaagacaagcaataaccgtgccaacaatgatctacctctaggcgtccgcctagcccgtcatgacaagtacggaatgccagtatacgtctcacagtgcaggacactaggcaagcagtctacccttggatcgttcgacgatccgatgcaagcccatgcggcatggcaacatgccaaggtagcagccatcctcgaatgtattgatctctatcagatggaggatgttcacagtgtaaacgttgttcaagcgttgcttgaaagagtggacaaacttggcaaggatattgcacagggaaaagagacaacccttttgcaatgatttgatggggtcgatggtcaaccctctgagagtgcgagaactccgccagagtaatccgatagcgaagctatcaaacgtatatgcatattccatgccaacatgtggaaagatttcacccggcagggcgggagcccgttggcattagttttgcatagcttagctgtcgctaagaaggaaagaccacggccacccattattttggatttactaagggttagggtagcgaggtgggttcgtggttaagtagctcggaaataaatccataactggcagaaggcgaaccagcagagggcaggcccgctccctccattattttcccagcagtagaggaggcacactctacaaacgtatcactctattcggcgggggtttaggattcgaatatacctttagcggctaaatgccatcattgcttatttcctattttcgtgctataatccttataggatgttcttattcttcattatagctggataagcgatggttgtatagattcaccacaaatagaaggaatatagaatggaagataatattcaagctccgcttgcagctagtgcaggtggcaaattcgcaactgtatacgaagctattgtcgcactcggagtagaaggggctgccgctgtgtacagggtaggtgtagggaatagattgacaacagctagaccatcggcgtggtaaagagaagccccgggcagcgaaagctgatcccggggctttttattgccttgagtttatgtatgaagagattccagttgtctctgctcttccatatactccctagtggcgtagttcatcatgaggttgcaatactcttcgtttatctggtccatgtattgcaacactttctccatgctctggcatggactaaatccattatgacggagaatcttgcttagattaccctcattccagaagtctctggcccaagcctccaaagctactgcgtagaggcttttgatgcacccgataggggatggataccaatattgctcagacattagaccctccaaacgcagcaaacaccccttgcttagctaggatagtctttagctcctccagtgaaatggtctcgtctcctacgaccacatacttgtctgccttccctagagtcatcacacacttagtctggaaggtaggccgatacaagtcatacacatcgggttgccacttgcttcgcaggccagttccgtagctaatgaaccggtcttcgggatgatcccggatgtataggcaccggggactatcatctggcccatctacggagatagggtgttccatccactccctgatcttatcaacgacgccctctcctaccttcaattgagcgtactgacagtactcaaggaacgcatcaaactgttcggcagtgaaattgctgacatcgatctctttagttttcattctcttcctccatgtctgcaatgatttccttcaacgcttgaagcgtgtaggtgccatttagctctgtagtaggaccagtgtcacactcatgaagcgtgtacgcggtcactttcttctcagtgacgaaatggaagtctacccttcggaagtcgtaggtcgatttcgagtatccaatggcctctttgagttcttcctcgtaccacaggaatgtcattggacttccgtcgcttttacgagtgtagtccagcagattatctccaacccacagtagcacttgagccttgtcgtacatgaagccgtttccgctcccaaactcgataccataagccttaaggtgctgttgtactgcaatgttctcttcgggggtcttcacaatagtgtaaaacttcaccaaacgctctttcaatttcagtcctcctgtctgtgttttatgggagtgtaaaacgttcccagtccattgtcaagccttctgtggtgatagtctgttccagacgctctctagctccttttagaatgatatcccactcatctccttcttggacccctacatacttctccatcatcagcgcacgatcaacaagcccagctctgtagttctgtcgctcttttctacgcgatagcactcttgagatatggtccttcttcttcgccaacacgctgatagctttccttgccataagagttgcatactcgctctcctcggcggtcatccattcctgatacagcagccctagacgagtgtcatgctgtacgagtggaaggtctttccatatgatacctactcgtccagtatcagagacggctttccattccagcgtagtgccgccggtcttatagtcggtgatctttacattctccgagttagattgagactggaaagcgtgcctccagtctcggtatacagtccaccgtttccagtcgaagaatgtctcacagatggctttaacaggttctccgattttaccctccagttctttcaggcggttctcctgctcagcactcatgtatttgataggtcgggaggctggatcgtagcactcctctacctgaaactcctcagcccgagactccaacactttaggctcatcgttactttcttcctctcggaaccatgcgaacagcttcttaaacatattcagtcctcctctcctgtgatagctaccctagtcagtctccacacttttctaggtagactaacgaggaatagcatagccataaacggtacggcgataggccagaatattccagctaacaccgctcgggcctctttcttacgcctctccgtactttctcccctccacccaagaaggggtcgtagagattcccatacgaacatccctatcacagagtagaacaataggcagaccactccgacgactatgcatactagaatgagaagccctacttgttccatggtgcgatcctcttaagtagtttacggctgttccagatagacagagcccacttaggtaacaacaccactttcaaaacgctgtatgttgcgtagagtagcagaaagctagcatacactgtgaatgtaataggccatagcagtcccagtacaatggcaaaagcctcgataccctctctgtgatctttagtcgcactagctgggaagttatctttgaaatactccgtgatacccatgtaggtccacatgaacgcaattccccacgcgagcgcgaggacgaatagcattgggattatctccattactcccctccttttcgaatcaagtcgaagtaggcccacacgtagaagttgcaccacgctctgcctatggcccagccttcccaatagtcttcccagtccttgttcggagggttattctcgaacatggataacacgcatgaatcagctacttcgtccaagaggtgcattaccgaattaagcggcccgattccaaaggtcttatctagccaccccttaaatcgtcccacgtctgagacggtgacgctggagtcactgcacagtgccaatctctccagaatgtagcacatgtaaggctcttcttcgttctcgaagaatgcccgcatgccttccttgattagtggtgcaatactattagagttcattttccctcctttcggatcaggtcgaaataagaccagacataaaagttcatccagttcgtctcagtgtctcttagacaattgcgatgaagataagagataactgattcccacgacgtaatcccgtgctgctctattagccactctctgaatgaccgatactctccgtgggtgatttgcccttcttctactaggtcactcaggatataacacatatatgtgtcccgggcgtttaccgagtaatcttccagtccgatctttatcaactctgcaactgatctcattgtttcctcctctgagagccccactagggctctaaatttttggttcgacctgcggtcagcacatcacaacccagttgtacaggtcggcctcctcataagctgatgggtagcgattgtactccaagaagaacgcgtggtcaatagctgagtatttggttgcgaaactcgtaatgtaagtcagaaacccgttgtcctctttcctgaacagggcgtattcttcagtaccgtccttaaacgtatctagcgagatagtatacttgtcgaagatcacagcatttcctcccggctaatgtagtagttgtagttgtcctcttggacgaggaacgcacgatagaagcctttctcaaagtctcccttgaccagcaccagattgccctccaccttgcatgtatagatatacatggtgtttgctactcggataacaggatcatccccgggacgaacatccagagcagagagcatagcctccattggcatgcttgtcaagtgtgcaactacagccgagcagtattctgcatcgcggccagaagtgtcctctgcataagcaggagcgaccccgcacgaatgcagggcgagtgtaaacgcaatagctacgagtttcttgaacatactaaccctcctcttggtctgtctggggaacatccggctttgggtagacgaatgtctctggatacttcatgcatcttagctcatctttgcagaacccgtcaatcaatttctcatgtgcgaattccgcagccttgtagtagcgattagcctgtcttgcctccactcgaaggaggtggcttatcgtgtgagcgttgatattactaagacttgcaaaaattgtcaagagcttttttgcagaaagaggaatcgacctttcatcgggtctgtaccagtccagccgggcaactccttggagaacgtcgtctacccacaacgggtagtctccgtctagctcgaccatgacttcgtacatttcaggctgaacagcgttgaaaaagaaagagggctttcgccctctgctggtatctagaggaggaacaagccccctctccaccttgtgaatcaaccgatcagcattcgcccctatccgagactttagctcctcgatctcttcacatgtcaacatacggagggcacaccttagatttctcgatagtgaacacgccttcgcatgtcaggttagcaggtccataccacttgaacatgttgttgatatcgtatcgaatcaactggcggaacttctgcccgtcgcacatatccacgtcgaaccacgccacgacccatctgacgtaatcttcagggtcgttctcttctcgccatctgcactctagatcaacgtgactgggctctagaacgtaaatgtcttcgaaccctgtactctggttgttcttaagtcggatgattcgagcgcgaatccattgcatgcacctgcggtttgggtctgtgatatcgcagactaccggaacctctggaacctcaactgtatacatgattgtacctctatttgttttacaagaacgccatgattctgtctctgtctgcatggcggtacagattgaagcaaggcacgcctctagaggacgccagttgccaagcggtcctagtcccgccttctggaatcccgttgtggtctgtcttgctccagcacaccaagaacttgctaggcgtgttgagatcgattcccagcacttggaaaacgttccgagtgtgggctcgtcttgcgaacgggcttagaacggacctcccgtcatttctgacagagttccaagccggatgaatttgactggcaatgcctttagcttcttcccattcagccggcaactcttcctctggcaggatggtagctccgagcgtctccgttatctggtactggttgaagccgggagacggaagatagatttctgccgtagttcctcccttgttattggatatataatccagccagcccgattcgaacgctgagtccgctcccttcgctcctcctgaccgaagaataaaaccttgttctgccagtttacggcctacctctcgaaggatgccccactctctgtttggcgtatccctacttccgactcctgtgtaatacttcataagatcaccatttcggatagctcttctggtgttacccattgatgccggtattctccgttcttcgggttagaatattccaatagaacagggtaatactcgtctcggtaatcggtgtctataacctcgcagttccaacctacagggataggacaagaacgccccttgggggccatcttagttccaatagacaacctgccttgactagccgcctcattgacgcttatcaggctgtatctgtgttttaacgcttcaactaccttgacttggaggtctaaaagttcctcgattgtaaagtggcttacatcgattgtcatattactccctcccttccagtttcttgaattctttgtccagcttagctagatgcttatccaacttgtctagctttttatcctgataaagctggaaagcctccgagcccggggccaaccaagtccccttatacttaattgcaccccggatcatatctcctcctattacagttcgtaaacgtatacctgaaactggccgagcgtctcctcgataagaggctcgacattgctccagtcctctccggctaaaccgcagccaatcttcggcagacctacacacaactccgaggtaggaatcgcccgagcgtcagcctctgcctcaaggaacagagacatagtgtacagggcttggcccagtgcgtcaagctgagtgtagactcgtccctcttctcggccatagttgtactgcccgtacagattgtaaatcgatccatactcgttaattgtgaaggtgagggagccgagtttgcctcgatcccctttcaccgttgcttggtctgcctcgtaggcctccgggaattgctcccggatttgcttagcaatgccgctgcccatggtgttgaagcaattagcctgatgtgcaatagcgtgcaactctttgtttttgaacgcggcgagcaggtcgccctttcggtatttaatcatttgaacctctctacacttgtgaatctgacttcagagcctctcgctccgtgagcaatgtccgcgtacattgagttaatggcagcaaacggggaccaatactccttctcccagattttgaacttgaacattttgtgccctttattttctgggcgaccttgttcgcagaaggttgtaaagtaatatttagctaacacctttatcctccttatactccgttcttaatccgataacggatagatgccaagtcattgttcttcaggtcttcggtgtcccatttcccgtctttgaagaacgtccgcaaggaaccagtagcctcctcctcttcagatacattatctttcaactggaggaatcgcccattttgcaggtctcggtacactttcaggaggcctttagccgacttcttcttgctgtcagttttcgggtctttgaagattgcaatgccttcaccgttcacttccgtgtaggtagctttcactgcgaatccgaaagtatcccgggtgttgcactggtaagtgtaactgccaactccaaacactacgttcagggaagcgaaacctttctccttcaagcgctccaagattttagctgctcggcgagttgtaatggaatctccatagatcaaaccgatatgagaatcgagcatcttatagcctgcttcgttcacagtaccgccgaaggtttcccacagaacttggatagctcctttcacctgcgcctcgctcacttcttcaagtttatagccaattacatactcgtattgatcccactcagtgggaataaccttgaagtacttatcttcaaagttcagaacaaatgcatcgtttccatttactgcatccatgatatcccagtgttcgagcgactcgacaacttcaatatcacccagtccgcagataacctctacaggatcaccagagtctggacgaacaaccagcttgccgtcacgttccatgatctgatccttgatggacggcagaatgtcagtaagcacgccccagaagtcgaagctgtctgccacgtaagacagaataccactcgggaacttacccatcagttcaacaaggaatcgacgttctgcttcctcacggccacctttaccttctccatccttcatttctttctcaatgcggaggatgttactagtagctacagcgtgttcagtcgcaggaacggagcaagctaccaaaccagtcgcgttatagtagtcctcagcataaatagctgctgccaatgtgtccgaacctacgaacgaggtcaagtgaccaacaccactacgggctgcgtcttcgatcccgctcataccccgggcactgaagtcgtggaactgaacggacagcaggaagtcgtcatagcatccagtgtgattcgcgtagtatcggcccatagctgcgtattctgcggcgatagtggcgttagtcgcggtcttccaagtcatagcagaaatcagtgtttcgtggtagttcactagccagtagaactccggcagggtgttcttgatggtgagaacaggcacgcccatcggtacactgacgccttcagtcagagacttgacctccagaggcagatagccgagcttgtgtagggctcgaagctgctccacagcctccatttcccggccaaaatagccagtcaggaaccgggcataccggccaacggcgttctcttcttcagccgcgaagaagccttcccaagactctacgatctccatccaagcggcccgtccgccgacccacttgagagtgccgtcgtagaagtcggtggcatgcgtctttcgataaatcttatcggagcgaggggtcaggttgctatagacaagctgagtcccttccgagtacatggaaccgtgtccaatcttataaccatcggtggaaagatgtggcagaattttcatgttatttcctcctgttgtgttgaataggcccagactacatcaatctgggcctcctgtcaatattcgacttcttctactggcagcgtcagcacagggtagatgcatggaaggcgcagcaatggttgcttcttgctgtggaagtcttcccaaaacttatcgtgcatcgtcttgtaccgagcgtccagttcctccttggtgtcgaactcctccaccttgacaaccctcttctctggagccgaacgcttatactctacaatccagatactcaagctcacaggcgttccgccttggagtattcaaccggaatgacagtcagcgcttcgtgctctttttgagggagcgtatccgaggtgtagatgcatccgaaggaatccagcaagcagtcgatacccttactgaagattccatgagtgacgaacaggtcagggagcactttactgtactctcttagggccttagacacgcttcggaatgtagcacctccgtcacagatatcgtcgatcaccagaagcggaagttcaggatcgatatccgaaggattcagaatttcaaagccttcgattttaccggtctggagatcgcgcttcttattgcaacgaattacagcggctgctccggccttctttgcaaaatcctcggtccgctttgttgctccgatatcaggggctacgagttgatattgctcccactctgaacggctcagtaggccaccgaagaccgaagattgacggacaacttcgacgttgttaatcaggtgcagagttgcgtcgctgtgagggtccacaacgataactcggtcatatccggcagagttcagcatgtttgcaaacactttcaaactgaaggcgtcgcccggattgcaccgacggtcttggcgagcatacgggacataacccagcagaagagtcatgtgcggattaatcatttctgctcggatcgcctcggtgacgttgagaagagccatgatatcatcactattctgaatctgagctttaacgtttacgaacgcatggctttcgatgccgcccacattaacgcccacttcgccgcccgggaacgtccacacttttgcctcttgccacggacggctcataacaccttccatttcctgaaggcaacctacagcataactaatcatacatcctcctcacagtttcacagagaagcgattccgcattgcttccatcgtgctctcgggaacatcgtgtacagacttattcccatgacgattctctacaatcagagagataacagtgtagccaaactcttcagccatgtcaatgtatggtgctacctctcgctcccgggtactagtattggatacgataaccgcatctagtcctatctccatagaccgtcgcgctttgtccatgcactttttgtgagattcaactaccctctcagctttccacacatacttgccgaactccatttggtaatcgtccgcttcgcagatagacgcctgccggcctgactcccaagttttgttatacagaatctcggcaagagaggacttcccggagcccgggagtcctcgaatgatatacatgatcttttcttgcatacttcctcctttaaattcgagccatatcgaagtaggtttcgatcagaagtcgtcgctgtgcatcggtcatttctgagaaccgagcctcatccacttcatttaccaagaagtctaccagaggatagaactcttcgtcaagcgtctgcttgaatccagccgggtcttggtacatcgcattgaccttcttactacccatcctcatgataaacttcttgccgaggtagtgagttgacttgcacttcactgtccctagccctgtttgtaccatgtaaccttctttctcacaagaactcagaagaccctttgcatgttcccagctacactctatgtgctctggacgaagaatctttacagaactgtggtccgttacacctagggcgtgagagtcaagaatatattctgaaagctggcccccagtgaagatatcgcggataccgatcaaatatgccccttcttcttcctcgacaatgtgagggtcgtctggagagcatatctcgaagttatatgtgaagcctgcgatgtaatcatctgggttattcgacacatacttctgaccaagggcaacgtaatcgccggtcaatgaccccgtagtactgaagataagggagccattgtgcttagtcacggagaacatgaatccattcactttctcaatcagccgcacacggaatttaggatggaggaaactcccagcaccattctctcccagattaaacaccttctcgaaggggcgtacaatacaatcaccggagtgctggtcaaatacatgaccccgtgcctccagaagaagcgggtgcttgttccacaagttgtcgtagaataccttacgagcgtatttaataaccgacataccgttgaagtgcttaacagtcaccagcttattagcgatcaggtctttgtacatctcaatatggagtttaccttccatcctattcctccttattctacttctacaatcgggcagaatttagacttcttcgctttcaaatacgacaagaaaatcccatcctttttatcgggcctcttagacatcagtcgagcgagccgatagaagaccgatacaccatagaatacagccgctacggcaatccatataaaccccataatagccaaagtcccgcctagaatgtagccggtcgcgggtccaagtagcagtgcatacaggctggagcctataaccgatgcaaatgcgactgaactgagggctagccacactacaagaaagaccgtttgccagaaataagagcagagagtaacgctcttccatccgctggaaatgtccaagtaggtaggactttcgaatttacgatgcaggcgcatatgccacgaattcttattaatcttcatgcttgttcctccgggaagatgttgaaattgagtacgttgtgctcttcgagttcgaaagaagctaccatcttgtagcctccgagcttgtcaacgatctccagtatactctcgatagagaatttgtcaacatgctgcttcatcagattagagattcgactctgatgagtaccacatctctcagctacttcccgctgagtgaggcccgactgagaaatatagtgtgcagccactgccattacagcctttttgaaatcttgaactgggttgctcatgttaatcctccttattactcagtgtaatttttccgctaaagactcgaaactggctgatctcgaactggtcagtccagcgagcgtcttcgaaagccactccttcgaaagttccatcaaacttgacgtctgaagtcatcagtacaatgaaaggcacgccttcatcgtggatcagctctacaagagtattagccttgggtgtaataccgttttcttcacgtgaaatcaacacattaaccatattatcctctctgtccgtcatggtgatctactaccacaaattcttgattccgcatgtattctctcacttcatcgtaagagaatacctgatgatctgggtgattgtcaatacctacatcaagcctctttcctttggaaggcaagctgccgtgagtgtggccgtgtagatgccaagcaccatgatgagcagtattccacgtctcgaaagggtagtggcacatcacgatcttcactccgtcaattcgaatctccttgtactcacgaatgtcttctacgtgagagagattgctatcagcgatcaacttccacagacgagagtcgcaatggtttcccttcaggaaggtgatacggccattcaactgcttgatgatatccagcacaggctggagcttgttctttcctgcaaatgcgaagtctcccagatggtacacttcgtctacccgacctacccgggagttccaccgagaaataagctcctcagtttgctcctcgaaagtccaaggcctgttgcagtattcgatcacattcttatggaagaagtggagatcggaagagaaaaatacagacattatgcctccttttcaaattcataaatcttgttgatcctgcggatcagtcgaatagcagcccctcccagcagatgctctcgatccggtttcatatgggccattgccttgaactctgacagcatatctcggcgttcatagtggaagtctactacccagtaggtgtctgcattaatcttaccctctcggtacaggtgcccttcaacaccaagccagtggtctactgcgtctttcttcagtaactctttcggagaccacttgtctacaccccgcaacttctcgaagaaagagtaaggacgagaatagttgttgatggcttcctctacagccgactcagcctgcaatttaatgaactcccatcttgcaagaacttctttaatctcctcggtggtggctggggtgtagctgtactgctctttatattcattccacattatactgttctcctacgtagcctttgaatttgtcggaacgggttgtcttcttctgtgccttgttttccagaaccgatgcttccctttcgagcatgctcagttggttgctatacttcttgatccgtttcgcattgccactcatcacagaatttgtaagattggcaatagtgtcgcagattttaacctcttttgcaaccggatgattacggcaaccctcgatatacttccgatagctttcagctcggtttttgtcaagaatgaccagagcctctacgatatgcggcatcacgcccatagactctaagtcctcctctgtcaggtcggtatcctcaagaacgtcatggaggaagcagaccgctagaagggtgtccatgtacggaaagtccgagaaggcctgattcgggtccatatccttcggagcattacgtgctacgcagattgtatgcacttggttcagatggtaggcatacggatagttggtctctccataccgctgaccttcatgggccgagagtgcgatctcgatagcaataccgagctgagttttcatgttaatctcctttgtagaatgtgtggttgcctatcttgatggtacgcttgtacttccgagcccaccgagggagcctgccattattggctctccttacctttctctcgttcaggtagtggtccgctcctcccgttggatcaacagtatacccatacagagcgttgtatgcaacatgttttgctgtctcccacttgtcgggctccttgacgccctgccgcatgctaccatcgcaggtgtacgaatattgacatttgaagtataacactccagctacggtgctgggccacctgtcgtgctgcatcctgttgatgacggtatgagctacagcaatctgcccgatttccggctctccacgggcttcgaagtagaccgcttctgccagcagtctgcaaggctttctgtactcgcacagtgttcgcttgctttctatgatttgagcgggactggcttggaactccactacaggctccgtgccgtattttagacgagagtattccatgtcgaggaacatcccaatgaaggctagaaggatcgacaaaacgagagcttctaaggtttccataacacctccttagacaaagaagcccgccttgtgggcgggctgtatatcactcggctattatacttcagcccaagttgtaacgacgggcgtagtctttgttggggaactcgaccatcatcgactgaatgtgaatgttgcctttacgatccttctggattttggcatttttcacaatcttacaggcctgcgccttagccataagctcagggcttacaaccagatcgatgaaccctgcactccgatacccgcatccggcaggggcccagaagccgtgctgggtcatcgtcgagccgggaacgaggtacaggttgtgcagacgcacagcagtgttgaaactcagcttgctgatatgcttcgcttcccgagtttgggtttcaaaacacccagtcgtgtagttgaatttgtaagtgagagcatccatgaactgaatgacgcttcgaatctggatagcagaagtatccaagagctggaactcctcagccgcgtcgattgcagtggtcacgttgacagacttagcgttgaacattttatatcctccttattcttcagggacaaatacaccgccgattacccagccagcgcgaattagtttaccagttgggaactgagcacgcaaggtctttttgaaacgactttgaatttgcacagttagccacttaccccggtagttctcaaaattagtgatctgatccttgcgttcgtcaaagtcaccgtacgtcacttcaagcagctcttgaggtacagggtcaaacaccaccagaacagcgttcccattcttgtctaccacgtagttcacgatctgcatttccatatcgaagaactctttgtacttctggagaccgctggagcgcttaccagattcgtacaagccctctgggctgcgccacatgataccctcataaccgttctgacggtacacgtcgtgaagacgtttgaggtcttcgaaagtggagcagaatacgtactcaacgaatcgaatactccccagatcactgtgtagtgcagactggaactggaagtctaccagacgctccttgaatgtcaagccttctttcacgatatcgaatacgtgaaattccagtcgctgccgcagtccgtaaataaacgatgtgctatctacttccttaaggagccgatcatactcctcctctccgtcttcaataggataggcgtccagagctttctcggccttcatccacttgtcgtaagcatcctcccgcttaaccgcagagttgatatcttccagcacctccccatggacgtacagttcgccgtcccacacatcaccctcttgcatgatctcttcgagttctttgatgatgtgcggtacattgtaaggtttacccatgcgagacgctagcgtaactacgccattggctttcttagccatgcaacgcaggccgtctagtttaggagagccatacccctctttgtatttagcgggatcaagcggttttgcgagcatagccataacagggagatcgttgagttcttccttggttgcacgataacccttgtccaactgcttgctcaccttggactgagcctcagacacggcctgctcctctacagagcgtttctgcttaccaactcggatgttggtaacctgagaggtcatggctccatgttctttgccgtatttcacgacgatattgaagctaccgtcttcctctccgaccacctctacagtccactccttgaacccgcctttcttgtcgagtccatacagtcgttgaaaataactcattgatcctcctcgtatttgatgacaagaacatcattctcccgtaggtgcctaagaccttcgtcgagccgatattcgtgcttatagtacactactttgatcccagcttcaaccaccgagatagcacaatttttacagcaagagtgagtgacgaacagggtagccccttgggcactctcagggctgcgtataagggccctcagtgcgttttcttcggcatgcctcacctctgccttggttactcccgtttcgtcctccagcggcccgtttaagtgctctggaagggcattatacccgcaactgatgatacggttacgttttactagaactgcaccaaccttggaacgagtcgagtcgctgcacttagcgaaggcctcagcggcctccatgtaagctttaatatgcttaaccttcacacctagcctccgccgacgaggacagcaatctcctcgtactcttcagtggatgcgaactccatgtaatagtcgtccgtatctgacaggtaaacaacgataggcggataataactccatacagggtctccgtgttcgatttcagctaccctcacattgccatacactgtgcgaagagtctgtagagcttcgatcacatcgtcaatacgcattacagttggttcagtcatacctgcctcctcagttttctactttacaaacggcatcgccgcgtcgaaggaacacttgcactgacggctttccgctccacttgtcccacgcttcagctttaacactgacagtcttaggattgatggcaaccacctcgcctaccagcataaccattccagttccgcctaggcagaatgctactgcgtcgccgatctcgatatcccttcctgctacgtccttcatttgtactctccatctacacccttgattaaaataacgaagtccgaggggtcatcactgccgtaggcctttgcccgaaactcctgctcgtatttattcaccgcctccggatcacttttaacctcaagctcttggtagaggtcttccataaaccaacccaagtccgtggtcgcagccgaagccgagaggtgaccaagaagtcctaccagcatattgatctcgtcgctctccaactccaacttgtgaccgttacgttttactactttcatatttcctcctatcgcttctgtccgcgacgagtggctacgccgtaagctggcttgctcccctcgcccgtgttgtgtttcttctgcactcggctggcattgacggtgtaacgccctttgccatactcttcatctatccacgcttgggccttagctcgctgagacgtgtggacaaagatgtagtagccagatgcatccttgataaaccaagtggccgggggctggaagtccagacgtgaaaactcttcatagtcgatcacagtcaccttctgcttagccactgtatactgccccactaccgactcttttgcaatgattttatcaatcatctgagttgaaagatcagagttcttcgaggtcaatttctacctcctttcctagtccagtatctgcaaagaagctatcgagactcagagcgtggtattgagacactttgtaaccaccactcttcagaaggctgtgagcggcctcctctactttgtcctctgtcagtctccagtccgcacctaggagtacttcagctaactgctctacactcggagggttcccaatccacagacccattctactgtcaggctcgtaatcttcttcccatacaagttcccacactaggttactcattggtacacctccttcttacgaatagaatacataacccactcgtcttttcctgtcttcccgcacggaatgtctacttcacactctgcgtttacaatcaggcccgctacgatgaaatcaagaagctcctcgtctggctctggtaagcccgggtaggacgatacaaccctgcggatagtctccgatttggtattgcccagtaccccaagcatgtggaggtcaaactctccactgtagtcgtcccagagttgtccaaatatcacccatacactattcatacctagtaatcctcctttagcttgttggtgtccattaggcagcctccttcttcttgtccagcaacttcaggcatcgtttgcaggtgatatgattgcggtagcgggagaagttcttctcctcgaagtcgccatcggtgccacagaagacgtcatatggttcttcactgtccgcttctgtgccgccgtcccactcgtcgtagtgaactgctcgcgtcgccattcacttcacctcgattccggcttgctggagggcttcgacgcactcatctcgataagcttgaaggtcttcgtcgaatatgactctcggcaggtccaccctcagagccgcgcggctggctttccatgcctgccacatcagcgagtagcggtgtgctgcttctataagagccacgtatacgtggacgttatcggtcttcacaggaaagtagtcggtgttacgccactcgacaccgccgggaatcgggaaacagttttcgaactcctctctcatactccgcaatcctcctgaatttctttaagaagctcagagggcataaccgacagagccagttcctccagagcatggatgtaatcctcgacatatttccattcctttctgatcttctgaaggtacacgccttctttgctgttgtcgatagcctgaccttccagctcctgcatcagttcgaacattttgtatatcctcctatggccgcaaaaatggccggcgactactgtcccggcctgatgatactactctgaaatttcttccattgcaagtcgtttcttttcaaagaaatcgctgagcttgtcttctagctcttcgccaccgatgtaaagctcttcccctgcctttacacgctctagctccttctcagtcaagaagtcactgtagacgtgatctacccatttatcgcaccacgctgagctaaacgctgcattcctcaggctattcctgaaatcagcagatacaacgccaaaagaaggcgcgtggatcatgaaatatgtgaactggtcgatctcaacggagtcgcaggctagcgcgatggcagtcatggcagacgcacactcaccttcgagacgagcatgcactggagcttgacactccttgatcgctcggattatagcgttggcggtctctacctgtccaccgcatccgttaatggtgatgtacacttcatcattctgacctgcattttcaagggtccaaagctcctctgtgagttcttcgaggctctttattacgtatggcagaaggatggagtaacgattgctaacactttgtgtacatgaaacaggcataatacctcctttacaaaaatgggcccgaaagggcccttattactgaatcactcctcgctttctttctggccagagcccagcattgcaaagaatggaaggaggattgtgctcagctctccgctgacagcttcaccaacttctgcaccagcctgagctacactcaggaactcttcagtgcgtacaaacttgtcaaccttaacgagggttttaaagtctactcgttccaagaacgcagcgccggctgcttccgccagaggttcgaggtttacgacttccatagcgcgatccagagcttcctgattgatctctaggccgttctgtgcggcaacctgcatcagggtagacttcacagtctggattgcgtagtctttgaaaaactcacgttgtgctttgttaaacttcattcacttttctcctttgtagtacgacgacggcgggtttttggtttatcttccgattcagtctcttggacttcctctacaggaacttccttagctacttctgtagccttttcctcagtctgcttctctgcaccttctcggaccatcttgacagacttgagagcgaaattcatgttagcgaagtgcgggtcttccacatcaattcggaagccttggtcaaaggcgttctgcatgcccatcagaagactgaaaacgtcccattcttgcacaatgacttcattgccgtcaagctctttttcgatttcctcagaaacgccttcctgacggaacatctggacttgacagagggtgccatacacaggatagccttcgatggagcggacgactcggaaaccttccttcatgtgggcgtgaatcgagcgaagccagacgatagggttgtattctacgatattgataacttgcatattctttttactccttgcgggttagtgttttacaataataccacgtttctcaggaatgtcaacccattttgttctggtagaggcttgacatagaggaaatctgtggtattatcaatattcagcgtgggagagatatgtctgaaagcactcaccggcccacgcctagcgcctatgaagaggaatccacaagggcaacctgaactcgaatgctgttaaagggtggagacgacgcgaaagcggaatgacagcaatccgatgcagcctacatgctgcccctcaccgaactcatctgcatgagtaagaggaattggatagagccaaggcacgtcttaggcagattaaattctgtatggcgagccttgggacgactctatccttccctagccgaatctatctgcatggggtgttctcctgatacacatacacaaatacccaccacagataatccatcaatcaacccataaggaatttctatgagatgtaagtgctgtgatagcgaactctcgtttgagactccagtcatcaataaacatactggtaaggaggacgatctctgctcctcttgccgtaggtttgctctcaatcctacactggatcatgagtattttggtggttggtatccaagcgaaggggttaccgctcctctccctaccggggactgacattgtatatagagtgcgcgtactctgacaatatgtataaatagtagattacggtgcgaataattctttaagggcttgacaacaggagatttcgtgctataatcggagtatatggggcttacaaagcttcagaggatttaatatgactcaagaaagaaacaagggcggtcgccctacgaatgccgagctagaagcccggggtatcattcagacagacctgaaagcagggcttagacttctaaagaagagctttgcagagaacatcagattcctccaagagcaatctgacaacccagaggtctctctacagatgagaatcaagctcaagaaagagctttctgacatgttcgtcgcttactacaaagctgacattgcactcaaaaaagagcttgcaaaaggaacagaatcaggagataatgagaactctgaagaggacaagactcccggagtcgttctcgcgttttgattaattgccgcttcgttcaatggtaggacgccagactttgaatctggagatgatggttcgatcccatcagcggctgccaaatgtagtaaaagaacattcacccgacaaggaatgtgtctcgctcagaggacagcgagtaataagtgtcctccagaattaagggtcggtgagcgtaattggcaacctactggattccaaatcctcgtattctctgttcgaatcggagtcggcccgccaaattagtgttgacaggagcaaagacctcttgtatagttacaccaactgctcgtatagtgtaatggacagcacaacggtcttctaagccgtaaggtctaggttcgaatcctagtatgagcgccaaattagatggacggaagctaaaggtgccacctgggtccttttcatcacgtgctataaaaataattataatttaaattttttaatataaatatataaattaaaaatagaaagtaaaaaaagaaattaaagaaaaaatagtttttgttttccgaagatgtaaaagactctagggggatcgccaacaaatactaccttttatcttgctcttcctgctctcaggtattaatgccgaattgtttcatcttgtctgtgtagaagaccacacacgaaaatcctgtgattttacattttacttatcgttaatcgaatgtatatctatttaatctgcttttcttgtctaataaatatatatgtaaagtacgctttttgttgaaattttttaaacctttgtttatttttttttcttcattccgtaactcttctaccttctttatttactttctaaaatccaaatacaaaacataaaaataaataaacacagagtaaattcccaaattattccatcattaaaagatacgaggcgcgtgtaagttacaggcaagcgatccgtcctaagaaaccaccactgctcactgccaaaataagtgattttaagtgttgacaaactgaatttttcatgttttaatacacttatcagatgaagaaacaattagcgagtagccctgagtaggtcgggaactagtctagaaaactaggccactgcgatgagcggtgagggttcaactcctttactcgctgccaaattaaggccctgtggtggaattggtatacacatcagtcttagaaactgacgccgagaggattgagggttcaagtccctccggggccaccaaattaagaatctcttttgctatttggttagggttcgagtccctacccggcgactatggccggtctatggcggccaaatagtgagagagctaggggacatgacgaaggtagcgctgctttccgatctccccggcgctataaaagttatcatgaaggggttgacaaacaagaaattcatgataatataggtacatagagtaacaaacaatgtagccgggtagctcaattggtagagcacccgaccgataatcgggtggttgaaggttcaagtccttctctggctaccagaatttaaaggcccattagctcagtctggactagagcaagcccctgtctagggcaaggtcgtcggttcgaatccgacatgggtcgccaacaaggtcgttgtagagatagatggctactatcatccggctgtaacccggacgccataggctagaggttcaattccttccttcgaccaccaaatagcgagagcgttaagactggctggcgctgtcactcggctcataaccgaacacaagtggttcgattccacctctcgctaccaaattgcactccgaggaaccctaagtggtgggttcagtgtcgctacctatctcggtaaggggaagcgcctaagctggcacgggtaattgagtagctgtgataagctactggcagccagtataaatcgtccggctcgggcccgttatagctcctagatttgaattagatgctgtaagccataggaggtgatccagtatctcccggaggggcccgggttaacaacctcatgaatttagcccgcgttggccgagaggtttaggcggcggattgcaaatccgtctcacatcggttcaaatccgatacgcggctccaaagtttattgggatgtagctcagtggtagagcagggagctgttaactctcaggtcgcaggttcgagccctgccgtcccagccaatttccaaaagagactcttcgctttagaagcagagtcgaacgcccgatacgggccttattatctcctcgtagctcagtctggttagagtgtcggatttggaatccgaaggtcgaaggttcaaatccttccggggtgaccaatttaaagcgggtttcgtatagtctggttattattcttggcttccacccaagagactagggttcgaatccctaagcccgcaccaaaagtcgtagacctcagtaacccggagtaacgcccgggagaagatgtgagttctacgtatacgcgtctgaagctaactaggtagaagcaccgggttgaaattccggaggacttggatcgttaccaagcgggcgcaccaaacaatgcagttatagattaaatggataaatcgccagactttcaatctggtgttccgggttcgatccccggtaactgctccaatcaagtccaagccggaacattcctccgtatgtgctttcagccggcttggcattatcagtgtggagattgtgcagcccggatgctgccttccggttgtgacccggttgttggggttcgagtccccgcctccaaccaatgttgtggaattgaatcacaggacgacgactgggtgagattgagcgtcctctagcccgaaagggtgttcgcgcaaggcgaaccgaagccgaaaggctgaagtggtgcccggacccacaaccaatgttgtgtaatggaactattacgttgacgctgtgtgctctccggatcgtaagccggtaaagcgggaatagcgggctcccgtagcagagtagtagtgtggttcgattccacagcacgacacctttcctcctcgcctgtgctgaacggtttcctcctcctttcccgtctcacaggctctattccctgccctttaagcatttatggtgatgcaccggctttgtaacccggcgaattctgttcaagtcaggaatggggcaccaattcactatcaaagaacccgcaagctcccgatagggttcacactctataaggttgtagcatggaaaacactaaggttcctgataaaaaactcggaccaatcgcgctagcgcttaaagaggccagagagaatttcgatctcagccctcatgttattggtccaaaatctttcaaacagaaggagttcacagacagcgatgcaaagatcactgtattcggtggtgctgctggtgctggtaagtcttatctcggtgtaatggacttcatgaaatatatccatgatcctaacttccgaggtgtaatgactcgtcgtactactcctcagattaaaggcccgggcggtctgcttgaaaaagcaacagacctattcaagctcgttgaccctaaagtcaagtggaaagacaaagacggcaagtttgtgttctcttctggtgcagttattttccttcgacacttcgaacaagaatctgacaaagactccttccaaggttgggaggttagtaagttcctagtcgacgaaggtcagcagttcacagaaggcatggtgacataccttatctctcgtatgcgtaacccgaaatgctcggttgttccgcacatgaagattacatgtaaccctgattacaattcgttccttcgtaaatggattgaatggtggctagaccctgacacaggaatcccgatccctgagcgctccggcgtaactcgctggtttgtacgcaaaggcggtaagatgttctggggagacaccaaggaagagtgcattgcccttcatggtaatcccagtctagcgcctgacgatgaagatcaggtgaagcctatcagcttcaaattcatcgcggctaactgtttcgataacccaatcttgatgctcaacgaccctgagtatgtagctaaccttgaagcccttcctagggtagaacgtgaaaagctcctagacggtagctggcacgctagagaagagggagctggatacttcacaagggactggtgccaaatcgttccccatccgcctctacgggtgcttaaaagggtacgtgcatgggacatcagcggtagcattgaatccgaaaccaacagaaaccccgactggacagccggcgtgctgatgagccgtacaaaagaaggcttgttcactgtcgaggatgttgtcagagagcgtaggttgttcggaggtgttttcgacctcattctagaaacagccaagcaagacggtcaagacgttgaaattcaaatcccatgtgacccgggggctgctggtaaagcttatgctgcacagctaattagagacctagcggatcatggattccacgccagaccgaagacaactaacaaatcgaaagttactcgattcgccccgttcgtatctgtagctgaaactaaatcagtgcaagtcgttgcgggagattggaacgaagattacttcgatgaacttgagcgattcgacggaagtaaggctatcaaagatgaccaagttgacgctacatcagatgcatttaatgctctatcccttggcagcttgattatccctgatttcctaccgcctgatatgactcaatccaacaaattcaaactaaattaataggaggcggcgatggccgagactgaaaagacagcaccgggtatcccgcgacttcgcctaggcgagattggtagtacaggccttaaacaagtcaatggtactattctggaagaacgccgaccagaacttcggttccctagggcatgcagaacattccaaatgatggcggaagaccctaccatcaaatcagcactcgatctcttcgaaatgatgatgagcagggttgactgggaagttgatctaggagttgaccccgacgaggctatgaaggcccggggtaaattcctgaaagagtgcatgcatgacatggaacacagttggtactccttcatcaaagaggtcactagcttctacacctacggattctccgtacatgaaatggtgtttaagcgacgtgaaggataccctgtatcgaagtacaatgacaacaaattcggtattaaaaagttgccaatccgctctcagtctactatcaccaaatggttgtactctgaagacggtagaaacttcctagggtgtgagcaaagtcttgccaatgttgtcaatggcgaccgttacgtcaacctaggtaataaggacggaactgtagagattccagctaagaagatgcttcttttccgggtcgatgctaaacgtgacagtcctgaaggtaacagccctctccgtgcgtgctataacgcttggagatatcgagtagagattgaagagcaagagtccgttggcgtaacacgcgatatgaacggtatgcctacgctctatctgcctcctcgatatatgtccgaagatgctacagaagctgagagggcagtctacgaatactacaagcgagtaattcgtaacattcaaatgaatgaacaatctggacttatccttcctcaagcgtttgacccagaaagccgacaacctctgttcaaattcgaactgacctcttcgcagggcagtaagatgtatgatacagatgccatcattcgtcgctgggacaacaaaattctgcaagccttgtttgccgatatgctgaagatgggtcaggaccaagttggctcttactctctagctggtgccaagactaacatcatggctatggcgattgaatcgcggctccgcgaaatcaaagacgtactagataataaactcattcctacgctgttcgcactgaacggtgattatagtccagacttgccgaagctgcaatacggcgagctagatgaaatcgatcttgaagagttctcgaaagggattcagagaatcggttctgtcggtggtcttgaacgtgaccgtgaggtttacaacaagattcgcaaagctctcaagattaagcctcgaccagacgacgagcctgttgatgtggataatatcatgggtggtcagtctcaagcaggtaaagctggagtaggtaatggtgcatcaacatccgcagccggtagagacaacgccgctgcaaataacgcataaggagacagaatgctgactcttgaaagtgttattgaagctctcagcaatgctttcggggctcccgccaaggcggaagaagccccggctgtagaggtcacaaagtccctagacaatgaaaagaggatggctttgtttgtcgttcttgagccccaagaaggcgactccacgactgacctacacgcagacacctactccgaagaggaagtagagaaagcttgcatcaacttcaatactcattgcaacgtagctaatatcttccacaagattgaaacacaggaagctgagattgtccagtccttcatcgctccatccgcattcacaactgacgacggaagagagatcaagaaaggtacatggctccagtggtggcacttccctgaaggctctgaagtagccgatgcactatgggaaggcgttaaatctggtgaattcacaggcgtctctatcggtgccagagctacagtcgaggatatcgaatgaccgtaaaagcaaaacgtaaactgaccgatatcaagtttgaacacgaaggtgctcatgtcgctctggtcagtaagctccaaggtggtgcagccaacgggcacactactctaatcacaaaagctaccaatggcgtaactgaagagcttatcgataaagctgctgaagttacagtcacaatgcagttccctgagttccttcgtaagttcttcgggatgtattatgaagatgccgaagttctctctgttgccatgggatatggcagaacggagtatccagaactagatcacaaagactggatcgaccagcgggtcgagtctatgtccattcttaagtcggtttataaatcggctgacctgaatcaagctctctccgagcttacccctgagcagaccctttcccttaaacaggatcaggaactgcttgaaaaggctctggaggtagtctccgagcaatccaatgaaaatccatccaaggagattaccaacatggaaactatcctgaaatcggcccacctagaagctctagctgacgctattgcagttgaaaaagctgctggtgtcgctgctgttgcagaagttcagaagcaactagacgccgctaatgtagagcttacagctcttcgtgaaattgtcaaggctgctgaggcagagaaaaccgctgctatcgctaaagcccgtaaagagcaactggctgaagtcctcccggctgaccaagtagaagatactttcaagtctctggaagttctggacgatcaagcttttgcacaaacagtaggaacgctccgcattcttaaagctgctgctgaccaaaatgacatgcttgtcgagaaaggtgtatcgggcgctggggaagaagacgactctgttgtcgccggtgttgccgctatcctgaaagctcgccacggctccaagtaatatctagccaatctagaggaattccaaatggctcaaaacattatcgcaaaagatcatcagcgtcttagcaactggctgaaagaagaacaaatgggccaccgtggcctgttctacactcgcgaaactctgcctgtcgctgacattgatgttaaaacaactggttctgtcctagacagcactggcaagctggtaactaaggctactatcgccgacgctacctacatcctaattaccgacctgcacgactatgccaacgctcagatgagccacgctgtcgtccttgctcgcggttttgccaagatcggctccaaggctgttatcttcggtgctgacgttgacgacgctgataaagctaccgtctttgaagctttcaaagccaagaacatcttcgccgttgaccagatcgaaggcgcattcgagaacgtcaccttcgcgtaagcgagggtcgttccagtaaataaacactaggagtaactttaaaatggctaacacccgttcctacctaaacgatggtcagttctacattgccgaccagactgaaaacctgcttatcatcccgaacacttggaccctcgtcgagaacatgggcgtcttcacaagtgaaggtgtgactcagaacactgtccagttcgaagagatcgaaactcgctacggtctggttaaggatgccatccgtggaactcgtcaccaagttgctagcgaccaacgtcgtcaactgcgtgccttcgcgattccgcacttcaaccaagacgactacatcactccagaagacattcaaggcaagcgcgctttcggtgctgaccgcgaagaaactctgaacgaggttcgtgctcgtaagctggaaaccatccgtcgcaactgggctaacaccgctgaagttgcttccgttagcgctatcgtaacaggtaagagctacgccccagccggaaccatcgagtacgactggtacgacctgatgggtaaaactcgtaaggttgtcggcttcgacctgaccaaccctaccgctgacgttatgggcaagaccgaagaaatcttcgtccatatgcaagacaacagccaagacggtctgatccgtggtgacttcgttgccctgtgctctcctgagttcttcactgccctgattaaccatccgagcatcaaagagttctacaaagcttaccaagctagtcctcaatactggcgtgaacgtctaaccgctcgcggtctggaccttcgcttccgtgagttctacttcggaaacattcacttcatcgaataccgtggcgttgacccgtacggcaaccgtctgatcccggctggcgatgcttacttcatcccaaccgacagcggtgacctgttcgctcgttacttcggcccgggcagcactttcgatgacctaggaactctgggtaaagaactgtacgctaccgagcgtatggctgaagaccgtcgttcgatcctgatcgaaaccgagtccaacttcatccacgttctacgtcgtccacagatgatcgttcgcggcactgtgaatgcgtaacggctaaggatttaaggtaaggaggtttatttatgagcattcaattttcgaaaattttgcttcttacggtgctcgcaacagccacgatctccaacgcccaggataaaaagtctaaaagtaagactgccaagattgattggtctcactggacagtgacggtccctgaggagaacccggacaagccaggtaagccgtattcactgggttatccggagattctcaattatgcagaggacaaaatcgcgtcaaaatacatgtacgacgatccaaaggacaaaagtgtcgtgttctacgcattcccgtccggcgtgactaccgctaacacccattacagccggtcagagttacgggaaactatggagaccgggtcaaacaaagttaactggaccttcgctaagggtggcaaaatgcgtggtacttacgctatcgacgacatcagcaaagagccggatggtaagtattcccgcgtaattatcgcccaaatccacggcgtactgaccgacgagcaacgtgatcttattgggcaaaaggacaataatgcccctccgattctcaaggtgtactgggataaaggtaaaattcgggtaaaaacgaaagttttaaaggacctgaacgccccttacaaagagatgcttctggaacacgcttggggtgatgacgaaggccggaactttaaagagaagattgacttaaatacacggttcacattggaggttaaagtgagcgatgggcggatggaagtcattcttaacgacaccgaaagtttggtctatgacgacattcacatgaaaaaatggggcattttcgaaaactactttaaagcagggaactacttccagtctaaaactccgggcacttttgcaaaagttaaaatttattcacttcaggttacccacctcgagcaccaccaccaccaccactgaagacttcagggaggcttcggcctccctttcgtcgtaggagggtaccaaaatggcttacactggtgatccagcaaacaaccctatcgaccgtctacgagagattgtaggggacgtgtgggagcctccgatgctttccgacgaaacctatcaatgggtgttggacaagaacgaaggcaacgaaagacgagccgcacttgaacttatgcgtatgatgctcttccgcctgacaaggggaatgagagaacgcacaggtgatatcgaagtatatggtgctgagtatttcaacaactacttgaaagctcttcagctcattctcaaagacccgaatattgcaatttctttggccgtgccatatgctggcggtatctccaaatcggatatgctggctaatgacctagaccccgacaacgtaacacgggaattctacatcggttttgcaagacgggagaagctttacaaccagtgcaaccccggtcctcaagaccttagcatggggtgtgattatcttggcaagcttcagttttaaaacagatcgccgtcgcctcacatccttgattaagagggtggaggctctagacggaacaacggtagaagttggtttcttccccgaggaccgatatggttctgaaaatggaaacctaccagttgcacaagttgcagcttacaacgaattcggtactactcgcaacccaacccggccattcatggctccaacctttgaagaattcacatctcaattccactacgcaagactaatgaagtccacgttcgagaacgtcctacgcgatggaaggcagacgaatactcttctgaagaaattgggtaaaatggttgcagagcagatgcaagttaacattgacgactatccgggctctaacagtccggcatgggcagcttacaaaggatttaacgatcctctattccatactggaaagatgcttgagtctgtcaagttccaaatccatcggaggcaataatgctctatcctaccttctccatgaccaacttcgtaaagctagatttgattagaagagggcagcccggagacgacggttttggaagacctacccctccagttgagacagtagtaacaatcacagctaacgttcaacctatcgaaaaatcgacagacactcgtatccttccagaggccgacagaagcaaggcttgcttcaaggtgtactccagaggcgaagagattcgacagttaaaggaaggcccgggagggtggagtgccgatagattcatgtgggaaggagagttgtatgaagttatgaaagtcatcaactattcgatgggaatcctaaaccattacaaagcaatttgtatgagagtagagaggaatagcacagcatgatccacacagagctagaaaactccctctatcttatggtcaaagagttgttccccgactggcgtgtaattcaagcttacacgaataatcaggaaccgcaaaccccttatctggctatcgacattaagaggctggatgaactgggaagggaaaatgtctccaatatgagcgatcccattagtccttcgcatggaactattcaagttcaacaggacttcgcagccaaagtcgtattcgaactgattggcaagtatggagagacagcaagtgtctctgacatggcaatggcgattactcgggcaatgcgtactccagcaggacacgccgcccaaagaaagtttaatctatcccttttcaaactccctagcacaagacgagttcctatgctaagagaaacagatatgtacatgttctatcaagttacatgtgaatttggattctctgttatagaaaccacaactcaagagtttgctgctggggctgatattcacggcgtttattacgacgctggtcgcccgggtcacattattgagtcccacatcgacataaacttcgaacactaataggagacaggaatgactgttcttactgatgtaattgacattcagatcagccgtgagactgctgctgtcgcacagacaaacttcaacgttcctctgttcatcgcttctcacacaaacttctcggaacgtgccagagtctacaacagcctgaaaggtgtcgctgaagacttcggagaatccgatccaacatatcttgccgctgttcgctacttcggtcaagctctcaagcctcgcagtctagttatcggacgcagacaagttccttctgctaccgtctctgtcagtgttgttcaggaaggacaaagctacgtccttaccgttaacggactacctgtcagctatgttagccagcaagacgacactgctactctgattgccacaggcctaaaggcagcttatgacgtaactccggtagccggcgtaaccgtcacagacaacgaagacggaactctaaccgtcgcttctaacgaagactggagcctgaaggtttcttctaacctgactatggctgctgctccctctactgaaggttggccggctgctatcacagcagttcaaggagaaaacgacgaatggtatgctctgagcattgacagccacgccgatgatgatatcatggcagtagctactcatatcgagggcaccaagaaagtgtttatcggagccactgctcaggctaacaccaagacttccgcagagaatgacattgcttctcgtctggttgctgccgggttccaacgtacggctctaatttaccatccaaacgctgacgctcaattccctgagtgtgcttgggtaggataccaactgcaagagcaaccgggtagcaacacatggacccataaagctctagctgccgtagatgcttaccgtctaaccccaaccgaatctaccaacctgaagaacaagaacgttaccacgttcgagcgcgttggtggtgtcaaccgtacattcggtggcgctatggccggtggtgaatggatcgacgtaatgattttcgtggactggctggaagcccgcatgaccgagcgtctgtggttccgtatggctaactccaagaaaatcccttacgacgccgttggtgcaacaattctggaatcggaaatcagagcccagcttaacgaaggaattcgtgttggtggtctggctgaagctccggctcctaaagtcttcgtacctgatgttctatccatgtctccgaacatgagagcacagcgtatctttgaaggcattgaatttgaagcccgtctggccggtgccattcacttcgttcacattcgtggaactgtgaccgtctaaggacggtccttcccataaggagattactaaatggctgttcaacgtctagcgacattctctccggctgatgttaccattgttattactcaccctgcaactggtgagagcatggttctcggcggattcagcgaagacagtatcgttaacattgaaagaaacgctgacacttacgtgatgtataccggagccgacaacacatcgactcgcgtctacaacgcctctaagtctgctaccctcactgttagccttcaacaaacttcgccttcgaacgacttcctgactgctctttacaactacgacgacgcccgtcgttcgtctgagggattgttcacaatccacgttaaagacaactctggtcgttccgactacttcagtgatgacgcctatgtcggtgttgttccgggttctaacttctcgaacagcatgcagacacgcgattgggttattcatgcacacaacctgcaaactctaatcggcggtaacgccaagctgagcccgggtgatgcggatactcttcgtaacctaggtgtcacactagaccagcgctggctgtaatatagcgcttatgccacatcgacggggagctgccttaacgggtggctccctttgttgtttctggaggatagaaattgattaccacctactcgccgcgtgacgtggttgtaactctcgctggtatccattccgtgacagggtacgcagagggagagtttatcagaattgtaaaagatattaagcctttcatcaagcacggttcgatggatggtgaaatcgcaagggtctacaacaaagaccaaggctggcgagtagagttgacaatcatgcagtcctcgccgaccaatgatatcctttcgatgctttacaacgtggacattgcaacccgaatgggaaaattcccactgatgattaaggacacgaagggttctacaagcttcctagctctgacagcatgggtggaagacctacctagggtatctttctctggacaactggagacccgcacttggattctagggtgctctgaggtcgccatgaacattggcggaaacgtcgatcaaagtttggtcgagcaagctatcctgctgggaagctctcttctgccagcccttacgcaattcggaggcttctaatggctaacacggtattgacatatagcccatctgatgttaaaattgtcctttgtgggtatgctctcactggtgtagtttctttcgaaatgtcttggctttcgagaccctacacaatggttcgaggaatcagagggcaccacacccgggtcttcaatagagacctttctgcgcagattagaatcgaggttcttcagacttcggtgtctaatgatgcattcttctcgctagtagagcaagaccgaagaacacaatccgcccgaatcaccttgtctgtcaaggatacccacggtagcaccatgatgagcacagacaacgcttatgtcaatggctaccctagcataacattcaccgatggaatcgagaacagggtctggactattgatgttctggactggaccgatggcacggtaggcggaaaccagcaagtcggcttcgacgtgtttggaactgttcaaggcgctcttagctacctcagataaataaggagtatttatgttcggaaaccaacgtactgtcatccacaatgggacagaatacactatcaaccttctgccagcaactcgcggtatcagcgtactgaagcagctaaccagcttgctgggtccatcccttgccaagtatcaagctgaccacgacttctctggagccatgaaagaactgttcgataacatcgacaaggttcctgttgagaatttgatccagaatctgatgctgacagttttcaaaggttcgatggcaatcaatttcgacaccgaattcgctggcaagtatgacctgctgtacgcactcacaaaagacgtgatcgagttcaacttcggctcggttttttctctaatcggtttcgcagaggcaccgacggtataaagaccggggatgggcagtccgagacttcagtcactactgatcgagttcagagtgatcggagggttagggaggcccaccagaagttctcgcagcattgggagatttatgtggctatcactcaccctctcaagctaacgacgtatggggaactgagtacagtcctcactacagaagatttgtacaacatccttgaggttatagacgttcacgatactatcactcaagtggcaaaagaacacgcagaggctgataagaaatgattacagaaaggattgcccagctaactggggaacttaaatttacagtcgattcccggcctctcactgcttttgacaagaagctcgctggggtcgaagcccggctaagagaattctccaagctgacgaacaagcggtttggagttaagctaactctagatacaaaaactctgagagaggagcttgccaaggcagccactcaaagggtagtcttgaagaacatcgcggtagatgctgccgctgttcgtcttatctctgagaagcttcaagaaagactgaatgcaacgccgatcaggttgaagtctgttaggctagaccttagcggtatccgagatcagaaaaacttcgtaaagacggctctcggccagaccaaggtcgatctaccggttgaactgggcttggctcaggctagccgtacgctgtatgaatggaagaagcgcacagagagtcgttttaaaattcatctgaatgcagacattagccgctctaaattgctccagaatgcacgaaacacactaagggatgtgcagggtaggctaaacggtcttgctgtcgctacgcctcaaattaggctgtctgtagaccgtgcccatcttcgtagagagattcaagatgttcttgagcaaatcagacgcgaagtgagaatccgcattgacctagagtcttccatccgaggaggtggtgcaggtggatcgagaggtactgccggccatatccgtcaaggtatgggaatggggattggtagcgagctagccgggtggggacgcgggtttattcccggccttggtggtgcgttcgctattatgcagcttaaccgtgctaaccaagaactgcaaggtcaacgtctggccatgcaagctgtcggtggtggagtacagggtggtcaagagctacaagccaccctccgcgatatctctcagcgtctcggtcttgacgatagagcaataggtagctcctatgttaagatgatggctgccggacaagcatccaacttcgacaaaacacaggttgatggcatcttccaatccatggctgaatatggacgagtgatgggtctggacggggaggctatgaaaggctccttccgtgccgtagagcagatgatgggtaaaggacagatcatgtccgaagaattgaaaggtcagttggccgaaagattccccgctgctgtagctctgatggctaagtctcaagacatgactatcgcagagctaatgaaaaccatggagaaaggggagcttaagagtgatgctctgatcccattcgccagaactctagcggaagaagctcgtaaaggtggcgctctggacgcggctatgcaaggtacagccgctcagcagggccgattccagttcggatggaaccgcactatcgaggccttcgcggctggaggattcgaccgaggaatgagcgacttcttcaagattgctgcccaaggcatgaaagaagcgcttcctctggtaactgcacttggtggcgggttcgaagctcttatgaggcctgtcaacgctctggtcggtattggaggggagcttggttcccagtgggagaacattgccaagcagttcaacatgaccggcacagggctgactcttaccacggctcaaaccctagccttgctgacccctatgggcaggttgatctctgctattagctggggtgcgttggcactggaagacttcattgtcttcttggaaggcggtgattcggtgttcggggacttcttgaacaacaacgtacaagctgccgagacattcgaaaagctagccagtgaatccagtgaactgaagaacaatctcgacggtatcttctctgttgtcccggggctagctgaagcgctcaaaggtctagagttcaatgaaatgctggtcagcacgatgagagaacttgctgccatcatggagttcttcaacagtgttgtagagagattcgcaatagccggcaagtacagggacgctaagattgctgaagccggaggagacagaagtactataatgtcgaacatcgacacgatgtacgctatgttcaatccggaagatgcaaaagacaaggccaccttcatcggtgacaggctagtagctcagaacattgacgcgatccagacagagactcatacccgtgcaacccagtccttgactccagaccagtttgggtatatgatgcaacgtggtcaagttagaaacgaaatggagggtgccctcaagaagagtgccattgacattagtttcaacctcaatgtttctggtatcgatgctcagggtaacgtcatgacaactgaagcgcaagagcgagtacgagagatcgttagtaacgttcttgaggaagaaatctccagagcttcggcaagttataaggaatcccaatgacaattgctatcaaaagagagaacggagacctaatctggttcgacgctgttacagagttcggaagacagtaccgtggctctgtgagttccaacccaatcgaaacgggaggaaaaatcacagaccacattactacagaaaacccagtcttcactcttacagccgtcgtatcagacgcagacttcaacttgaacaggcccgttatcaacgacaacgaggcccagacatacaagatcaacaacaaagagttcgtgaatacgcagccggtaaccatcccggctgttatctcaacctctagactagaccctagcagaatctttccagaagttatcactcagtttattcctcctgagattccttctgcaactgtcctccctcaaaagggtgataaagtcgcttatgatattgagcgccaactgatcgacatgcagcgtaatgctgaggtcttcagtttgctggacttccgagacggtatcatctgggatcaaatcgaaagatgcatcttcaccgacttgtctttcactgaaaacgccgagacaggtagcagccttcaacctcgtatgacaatcgaggctgtgacattcacagatactcgttatgtcgaggtgagggttaacaagggtagaaagaccgctaagaaagaaaagagagacaccaaagaaggtgataccggggctagcaatgctaccagccaagactctcctacattcaagcgtagtcaaatgaaagaggctcagattagaactcaggttgcgaggtagactaaatgagcacgacttatatcgacacacttcctctctaccaagaccggaagtacagatacgcagtagctatcgagggaatctcaagagtccttcaattctactggaatagccgctctcggcagtggcacatggatatattcgacgaggaacttaaccctatcctgacaggactggcggttgttcctcagtatccgatcatggcagactacgccatgcaacatataggtttcaatggctacttcctactgatgcctgtcaacctagaacaggtacagtataagcacgatgcaagtgacattgtaccacagtttttcgaactgctatacgtgaacgttgacttggaggatgacgtagagtgaaacaatatgacagagtgtataaactaacgctcggtaacactgaatccgggcaaggtgtagagattacaaacctccaccctgacggaagtttgaacagagagggacttcagttccggtttgatatctctaaaagttcagataacaagaagagcggaaactcggcgactgttgagatatacaatctgtctattgccactctgaacattcttgaaactgagtatctgacgtgccgactagaagttggttataaggaaatgggaacttctgttgtgcttgatggcaacgtggttgaaacttcgactagaaagagtggtaacgattatgtcactcagcttattctaggtgaaggatatacagcactaacagagaccaagctgaagggcacagtatctccgggcaaaactgtaaaggatgttatcgaagaaattcgtcttcaaatgccgggagtggacagaggagcttatacaggcctcaattgcaacaacccgatcatgtatggataccaactacgtggactggctaaagacgcactaaacagtgtgtgtgaagccaacaatattgaatggaacatcagtggaaacgttctaaacgtcacagacgttaacggcccaacaacgaagagtgttcaaatggctcctctcgtaaacagagagaccggcctgattgatatcccattctacgccagtgccagcggaacagcacagaagaaagaccagcggagacggaggggcgttcaattcaaatgccttctcaaccctgagctaactcccggggttcttgtccgggtagagtcggacagattgtcaggcactttcagaatcaacaacgtccgaatctcgggcggatacagagacaacgaatggtacactgaatgctggtgttccgatcttaaccaagaggatattgaccaatgaggagaacaggcctacaagagcttctgaacctgcactcgtccacagagggttcgaagcagtacactgccataccttgtgtggtattgcgcgttctggacgattttagacgcctatctgtcgatgttagaccagtggtcaacgacctgtacaaagacggcacatcggaagagcaaccagagattctatctgtccctgtcattatgccgggaacagctaacacacttatcagcttcccattgaatgttggggatacggtgttgtgtgtattctctcaaagaactatggacgtgtttaaaggctctgccactggacagccacacactccaaacgatcttcgtaagttcaacatggcggatgccattgccattcccgggctgttcaccttccctaggtcgatgaacgaccctgcaagacatagttggccacatgataccaaagaccttactattgcccacaacctgatgacgggacaagaggcggaagttaggatcaaagccaatggagatattctaatcaacagccgcaagactataagcattaatgctcaaaatgtcaacgtcaagtgtgcttcactcactgtcgatgcagcccatacaacatggaacgggaacattgcacatacaggtaactacgtgcagactggtggaacttctacattcaacggtattccattccacactcacaaacacggtggtgttatgccgggcggcggtgttactgctgtcccacaagcttaaaggagatcatatggacttgtttgtcaaccccgacacacatgacttggtttttataaatggtgaagctccagtcactcaacgaatggttgatattgttgctcagcgactaaagatcaaactgtacacattcctaggtgagtggttcttggatgataggatcggcatcccctacttcgagaggattcttggtaagtctaggagccttcccgctgttgacgcgatattccaatctgagattatgagagaccccggcgtccttgagattacatcttggcagtcggggatcgaccctcacacacgtgaatactccatggagttcacagtcagaaccacagacaatacagaatcccttcccatcactttcagaatgataggagtttaatatggctggaattacagcagaaggtctaacgattaaagacttggaccaaatcctgacagactacagaaacgtagcctctcaggtcttcgccgacctagtttcaactggagacgaagttgacacgtctggtaactctgctctaggccgtctgatcggcgtagttgctccatcggacgaagctatctgggaagttatccagatggtgtataactccttcaacccggcagccgcaactggcgtggctctggataacctagtatccttctcggcaattagccggcatgctgcacgtccgacccgggctcaggttgttctagagggcaacatcaacaccgttattaactcgcctcccgcgaagatgatttccagcagtacaggccgagtgttccacctactacaaggcgtgatcctcactcctaaagcttgctctggtgttggaatcttccctcagacagtaggcaacgacctgacgtacgagcttaagatgtacgttgatgacattaacacaacgtctatcaagtacacaagtcctgccactggcacagtaacatccgagtccatcctagcaggactggccgccgacgtagctacaaatcacggaaataccttgacaagctacgaacagaatggtatacttttcatagtacctattgacccatttaacaccaagactttcgaagaagcctccaacctgagtattcagaaggttagaaagcttggtatcgctgttgacgacgttattggccctgtgcctcagcaagctctagctatcgatacgatctccattcctattgccggatgggacagcgttatcaaccctgttccagctatcactggccgtctgcgtgagaccgacgatgagcttcgcgagagattccgaaactctaaattcgtacaagccaccaacattctggagtccctaatcgacgggctgatgaacgtagaaggagtcgaggatgttaggattatcgaaaacgatacagacaacccagacccagttcatggagtcccgggtcactcgttccttccaatcgttcttggcggtattcctacagaggttgcacagtctatttggctgaacaagccattcgggattggctctgttggagatacagaggttcaggtggtagacagtcggggatatacccatagagtcaactaccagcgccctgtcgaggttccaatcgagatcaagatcagtgtaacaaacacaggatcgatgccagagaacattgaagatatcctacggccaaggattgtagcgtacgggaccgagaattacaagatcggagacgatgtaatttattctcgattctatgctccaatcatggaaatcccgggcttccaagttaacagcctgacgattgccaagaaaggacaaactcaaggcatggcgaacattgaaatcgggttcaaagaagtggctacattcgccgcagcagatatcaccgtaactacggtgtaatgatagaaggagaattccatggctgtcaaccaatttgacagagaagattatctggaggtggcccgggaacgggtcactgaacagtttaaagagaagccgatctttgatcgcttcctgcaagtgctattgtctggcaagtttgatatccagaatgcactggaagacctccagactctccggtctctggacacagccaccgggaagcaactggacattatcggagacattgtagggcgaccacgcggtctagtgtaccaagatattttcaactattttggattcgctggaacggagcgtgcaggttctttcggaagcctgtcggaccctacggtcggtgctccatggtactcggtcggtgctccaactggtaacgccagagagccgagcgacgaagagtatcggatgatcctgaaagcaaagatcatcaagaacagaacaaactcaaccccagagcaagttatcgaagcttataaatttgtattcggggttcctgaagtattcctagaggagtacgctcccgctgctgtccgtatcggcatcggtaagattctaacgaacgtagagcgtagtcttctattcgacctaggtggtgcaggtgcattgcttcctaagactatcggggttaactacacatacactgagttccaagctggccgggtatttgctacagaaggcttccccggaggacaaggcgttggagacctaaacgatcccactgttggtggaattctgaccaacctagtgacataaggagttataaatggctgattacagtcaactacctattgaaaatatttggtccacaggcggggatatggtagccccgacccctgcgcagcagcaaggcggatggggtattcagtcggttcctcgccaatggtggaactggaagtggaaccttcacgatactaacctagcgtatttgctacagaagggcatcccagagtggactagtacacaagagtacattgctaacaaatcgttctgcactagaggtggatttgtttacaaggctgttcgtacgcatacaggaagcgaccctgcacaagttagtgccaactgggttcgagcttttgcagattacaccacatctagctctgcacttggaagcctgacaccaagagagggtggaatcccattcttcattagcgctacaggagctagcgtgtttgactctacggcctatggtcgcggaatgttgaatgtagctaatgcctccgcagctagaagctacatttcggctcaagaaagctctgttgtactgtccaacctgtccactgtgactagggctgccaacacggttccgtacttcaacacggatacctccatggctaccttcaacatcacagcgttcggaagaggacttgtcaacgcggctaatgatgaaaacgcaagaaatttcctaggactagctaactctgctatcattacggcagacccagctaacagggcacatactctggtctatagagatgctgctggcaacttcaacgctggcgtaatcactgctaccctgtctggaaacgcaactacagctaacaagcttagaaccccagttacaatcaacggtgtggcgtttgacggaagccaaaacattgttcttccgggcctagatacaagttatgcgggaacggttgcacgtcttcacatcaacggagcgaacctttcgagtgcagataagactactcagctagcactgaggaacaaatctgacaacgactggattagccttgctgtagtggatgacaacattctccagtttgtattcagaagcgctacaaacccagttgtacagattggcaacgaagttatccttcacacaggaaaccagttctctctgggcccgactcttacagacgctaggtctcgtctgggtctcgacagactaactcaaggtagctctgatactcaagtcttccccagcaccttgaacaatggcccctacttgaccgtacaacctacggctatcggaggattcaacggtagcactaacggatggctgttccgattcgacgctaatggtaacatgactcatggtacagttcctgccgctagaatcactggtctgtccaactcggctcagattccagccacaactacggcgcaggctaactctcttgttcagagagacgcagacggaggattcagcgctattgcgattaatgcgtatggcactatcgtcgggtacggctctaacatcttcagtagagcatcgggcactggcaacgcccacatcgggttccagagagcgaacggaacagaactcggtcttatctggggagcccaatctaacaactcgatgaacttccgagttgctggcggagccaccgcagtgtcgattaccggtctggacatgactgttactggaagagtcaatgctaccacactaaacgcctctggaaacgtgaatgcgacaggcaacgttaacgccgggagcgctacgctcaatacagcagggaatatcacaggagccgcttacggagcctatggttctctgaccaactgggttgattcggtatatgccaagaagggagaaattcctaacgatatcgcaagagccggagccgcttgggacgctgtaggtcagtatattctggcgggagatcaatctggagggtctggtggaccggggacaactagagctggaagccagttgaagccttattcgactattagctacacagcaggggcactaccagcagcaggcacttacagatgtatgggagcgtttgcaggtggtggtaaccagattaccctgtggcagagaatttcttaatagagggcttcggccctccttttagaggagattatagtggaattcagaaatgttgtaaaatacaaaatggggttcgaatgcgaggtaaatcatcctcagtggggatggattccgttctacgcttgtgattacgacgatagagccaaactggtatatgacgccatcgcccgtgctgtcgataacggagaaatccccgaaccaaaggacgttacagatagagacctcgttgtagatgcacgtctgtggagagataatgagctaacccgggctgatcgtcaagtagaaattgctatcgacgatgaagacgaagtaaaagagaaggcttggcgtaagtaccgctctgcactacgtaagtggcctgagcataaaaacttcccagccgagaagagtaaacccaaagctccgaaggagtgaggtaagataatatgccaaacattatgaagcctacgggaatcaacgctatctggtctgaaaatggccagaaggttgacccgggtgctgtgaaagtagggctaggctgggttacggaacttcctccgtaccagactgcaaacttcattgaatataaacaagacctgtttaacgctcacgtcaaccaacatggtatccctgaatgggatagcgtgacagagtatcagggtaacctgagctacactcaaggcgctaacgggatcatctataagtgccttagaacccattccgacaagattccaactgaccctctgaacattacagccggatattggcgagtggcgtttgaggatgcgggagaggcagctaaggttcaagccaaccttgatcggcatgtaacaaactacaacaccctctctgggattggcaacgtagttattgcaagacaaaacctaagtgtgtatagtaaagctgaaggcgacgcccggtacgctatgaagcacgggaacggctctaatgttttcagcgtcgccactgccacacagccaactcacgcgatcccgctgagccagctatcgactctcgttcctcctgcgaccgagactgtagccggggttatggcagttgctacgactatcgagacagaagctggagccaatgataccaaggctgtgagtccgctcaaggccgcacaggtgtatctgaagaagaaagacaacctttccggtctgtctaacgtcactgccgcaagagctaatctaggactgtcggatacagcgactatgccttcttctacattcctgaaggcaggtagcaatctggcagatgtgcctaacaaggcgctggcaagatcgaatcttggaattacaagtagtgctacccagccggaaacctatttcttgaggagcgctcagaacctagcagatgtacctaacaaggcacaagctagagtcaacctaggcctcactgggatggctacaacagaccctgcggcggttatgatgaaggcagacaaccttgctggattggctaacactgctaccgctcggtccaacctagggctaggcacagcttctactagaaatacaggagacttcctgtcgtctggggataacctgtccgacctcacgaatgtccaagcagctagaaacaacctagggttgaagggagcggctacgctcgatgtatggggtcttcctgcgaatacaactgccatggacttccagtctaatcagtcggatatttccagaggatgggctcgactaccaaacggccttctgctacaatggggaactggtcccggtctatctgatgacacaaggacgaatatccaactccctgttccagcacgaatcttgaacgttcaagtgaccgtaatggggacgtttaacaactccatcggcccgggcgctttcatgacggatatgtggagcaacaccgggtttagagttagctgcaactggggcaactggtcttacccgttcaactggtttgctatcacttccaccctgtaattcaggagtatcaaaaatggctctaactgagcaagacttccaatcggctgccgatgatctcggagtcgatgttgccagtgtaaaggccgtcactaaagtagagagtcgtgggagcggctttctactttctggcgtccctaagattctattcgaaaggcactggatgttcaagcttctcaaaaggaagctaggtcgtgaccctgaaataaacgacgtttgcaaccctaaagctggaggatacctcggcggacaagcggagcacgaacgtctagataaagcagtcaaaatggatagagactgcgcacttcaaagtgcctcttggggcctattccagattatgggattccattgggaggcactaggttatgcgagtgttcaggcatttgtcaatgcccagtacgctagcgagggatcgcaactaaacacttttgtgcgcttcatcaagaccaacccggcaattcacaaagctttaaagtctaaggactgggcagaattcgcaagaaggtataacgggccggattacaagaaaaacaactacgatgttaagctagcagaagcctatcaatccttcaagtaaatctaggaaggttcctaatgaagaagctattcaaaagctggaagttctgggctgctgtaggctctgcaacttttatggctctggaagccatggttcatctttgggagcctatccttcctcccggcgtgttcgccgcagtagccacactggtagctgttggtgtgagaatttcggcagtgtttgtaactgctggtaaagtggaggaagcgatttcggaaaccatggaacatgacaccatagaagatggctcaatagaaaatgatactaactaaactcaaaaactacgccctcgtagtagctgccgcaatggcagcagggtttggatatctgtcgttctctttgtacggcgacttagctgttgcgaagaatgatatccaatctcttcaagctgcgtctcgacagatggaagagcagttccagaaagagcgagcagggtgtgagatcaccactgggagactagaggcgcatatagtccaaatgaagagccgacaggagcttctacaaggccacctgtgcgagcttgagtctctacctaacccaaccccaagggagacccaagaaaatgccacagagacgatctctgagccttctactggggatagtctggaccctgctcttacaagcttgctcgacagggccttctgttccgcagtaccaaacgatccttattgtgcccccggcaagcctgaccgaggaggttaaggtataccgagtggagcaagatacagtcaaggggctcgctagagcttacattctaaatactaacagtgctgccatgtgcaatagtcaactacagacaataaagctatgggcagaagagcagagggctctatatggaaagtaaagacggcaaagaaggcctaatcaaggtagctacacagggagttatctctctgctaattgctatcctaatggcttggtctggattcctaagttccagtctttctaagcaggaagaacgtatctttgcgatgcaaagagatatggtatccgaggcaaaacttaacgcactagagtcgagattcaatagccgacttgaaagtgaaattagtaacgtaagaagagaacaacaagaaaccaaccggtatttgattttgattatgaatgccgtcaagggtcgggatacagaaactcaataactataacccgttaacccacactgggagacaatataatgacaaggaaacaagactggccgctagtttcagcagtcggggctttgtttatctccctccttgtctgtatggctattctggctttcacagcgatgactcccgaggctcggtttgactctgtacgccagacctacgagattcgaattagcgaatctgagcggcggtatgaactcaaactgaacagactacaggatcagataaactcggcctcgtacacacaggatcggcaatcccgtttgcaatatgaagaactcgactcgcttaaaaggaagattagcgaacttgagcggagaataaaagaaaaacaagaataattaagccccgggagcgaaagcttaccggggctctttgtcatgggttttcagcgaacaacttgataaacttcatcgaacaggtcatcaagcttctggataaccttcttagccagcttcttgcgaactttgttagcctctgggctggaatggagtagcttaatatcggacgcgttgccccagtccatcgccccgttgtcgaacagcactttaacattcagatgcatcgagccctcgtcaatatcgacaactacgccggtcatccgagcgttggtcttttcgaaggtcggcctcggaatgtctatgtccagactgccaaccataacaacctgccctttcttaacgtcaaataattccatttaaaacctccttaatctaacttcattagtgtgttgaactgatgcctcagagacttaaaagcctgtggcccatcgtcttccgctccttcatgaatatgatgagcgattaagtgtatcaatcctcggtctcctagtaacaaagaactaggaatttcttttatccaagccacaaagcaacagaagtgtagaacctccggcatggaagccttgaagctggaatcatccagcttcgataggcgttcatacgtagctttaagatcgggatagcttaactgatatgtagcatcttcgtcaatatgctggtcccctctaactacatactgcaagctcatattacaccttctttccgccttctgcaagacgtgcctctcgcttatggtcggaacgggtcatattgtactcgatcttctcgatgatcgcacctgcaacatctagacctcgaacattcgcgtagtccatgatacgaatgatagcgtcagccagttccacctcttccatcttccgctctggcaagtgatcgtccatcaaatccttacggactccttcagccgcttcggcgatttcagtggtaacgagcatcagcatgtgcagagcatcacgtttaatcggctcgcctgtgaccagatcggtgttccacttgcggttaacaacctcaaggccagtcatcattttgttaaaaccgctaacaaactcgaagacggactctcgttcgaatagttcaccgaacgttggctcttgatcttcgacaattgcagtgtggaaaggccactccatccaagcgtcatagcactttttgataagctcttgttcgtcaatgtatgagaagaaatcttcatatccatcaatcgcattaacaacttcagttcccctttcccaattgcgcttatcaataagtctctggtcgattcgcagggaagtgctgccaacttcttcccatgatctccagcctactatgccatcgccgaagtacaacagaatgggcagattgaatccgcgttcttcctgatccttagtctccatagctataacaaacgccggtactttttctccacttacgccattggccaagacgaaagaacccaagtgggtggtctctcggctagctgggcgatgagcttcctcgatatgatctttaactctactcattaacttcaccctcctcgcagaacatttcaaaataacaatcgacacaagttagcatgccgtcgtcgcttacaacctcctcgggagggaagttgttcccgcaacattcgcacacaactcgatcaacctccctgcatccccagtaagccatatttactcctccttcagaagatactcattgctaataactttgaagctgaagtctcggctcatgcttttgaaaaccaagccttcccggtacttaccgttcaacgcagactcgccactagccattttaattacgagttgcatgtcttttggaacgcctacgtcccacatgtacaccggcacatgtttgaccgtctcaccacccaactggttcagcgtattcagaatggcaagacgctccgctggaagacagtaacgactgtccgaaatgttgtagatatcgtacacatagtattccggtttgtcaactccctcgaagttgccttgaatatttggtgcaaccagttcgccttgaagggcaatattcagaccgaaataccggagacgttcaccaagattaagctcttctgccatcgcagtgaagtgattggagtctttcttaatcacacgcttccagccccgacccttgaagaagttcttgatagcagtgaagaacccgatcttctcgtcttctagacggaaaccgacatttcgagacgccacgcctacttctccgtccttgtgccagatagtgagagacgaaccgtccaatttgaatgtcacttcaaacttctcgcccttctgatgagcctgatcgtaagccatctgaatattttgtacgcgagcctgatccgtcttcgggatgaagttggggaaccctagcttggaagtgccagtccggctgcccttgttgcctccattgatagctgcctgctcggaaggctttacatacttcaggatgcccattcgatcggtaacatcttcgtctactttcggctctgggctgcccgctgcatgaacaggtacgatcaggccttgactaagctctttacgaagcttcatggtcttgattcgagaatactcttttccaccttgttcgaccatattacggcctcgcaggaattcaaagatagggttatctacaggcaccatggaatccacttcaatgtagattgccagatcaccagcctgatattcccctcgtttgattacgcactgccaaccaccaacaagcgccagatcgaggctgtcagcgttaggatgggtcttcacatcgtcgatacgcaccactcgggctagtacgcggtcttgggaattactcatatattatcctccttgtttgaaaattggtatattacttgttaaaccagccgagatcaatagcccgctctagggccagtagcagattctcagcatctagaaggtcacggatcgcgatccaactaccactgtctcccggtagaccgtctgtgatatacacaggtatgtcactgtattcgctctttttaagcccgcaggcacaggctacattgtccccgaagacaatctcgctgacttcccttgcctcgtctcgaatatcgatcttcacacctaccctcctgttgtgttgaaagttgttgtattctgcccggatatcttcgcagtgtcaatagccttgacaagaaaataatccgtgatagagtgaggtctctgctggagagaaatgtccacgtcactcaccggccagcagtatagcgtatgaagaggaaagctgcaagcgcaacctgagtcgaatctgagaacagggcagcgacgacccgaaaggggaaagctcagagcctataaggaacccatgttccccgctcaccgactcatctgcatatatgtatatctgcatgagagcgagaggtagaccaaaggcatgtcttaggcggagattccgtatggcaagccttgggacaggtctgcctccactaccgatctatctgcataaagggggtacaatgtattcagcaactgttgtgaacagacactacgagaaatttgatgtgtatataggaagggggagcaagtggggtaaccccttctcccacaaggaaggcaccagagccctctacaaagtagatacagtggaacaagcaattgagtgcttccgaagtcatctttggcgtaacataatggaaggattaatcacagttgatgaccttctggagcttgacgggaagagattggggtgttattgtaagccccgtccttgccacggcgatgttctggtgagggcaatcgaatgggccaaacaacacagaggagtgtataaatgaaacatgttatttaccgagaagacctaatcgacctgttacgcgaccgtatgaagctccaagcgctggaggctggtggcgttgacaactgggactggtatgaggcctcgcttatcgactgcggattcttcgatgatgacgggcgtgagcttgaggtcgaagcacttgcagattgcttcccaaccgtaggtgcgtaaccgtggaggagtcgaaagctaccttcaaagacccttaccctaggttcttcgacgcttctcgtaggtatggcgaaaccaacgactgcatggtggtgagctttgcagtcgtatggaacaccacctatgaaaaggcacaccagcacctgaaagtgaagtgcaagcgcggttaccggcaaggggctactcagaagcgcttcagctacgcagacacttggtgccctaagacccggatgctctaccgggaggatgctaaggataagactcttaggcagtttgctgaggaaaaccctgaaggtcggttctggatcgcggtaaagggtcacgctattgcaatcatcgacggagtgttgtacgatcacactaatgacaaaagacgcaccatctggcactgctggcaagtgtggcccggggaggcacctgagaaaatcgagaggaagcctgatccaatctcacctcctgtgagaaaggccccagattggtatgtctgaagattacaactgaggaggaattatggaaattatttcgagagggacgctccctcaagaggttttgtttacggctaagtgccaccactgcttgagcattctccgggctaagaggtcggaacttaagtatgtttcgttctcattcggacgccccggggagactgggtattatttcgcagagtgccctgtgtgtaacgaagaggtgtctgcttgggttgtggttcctaccagccctgtagcacctcctcccactgtagagtatatcacaaaggagcgtaaataatatggaccagttagcaggattcatgggcgaacctttcgtaattgcgttcgactacgacgagacgatcagtctctaccctcttgccttccgaatcgtcatggataccttcaggggctttggaggcgctttcaatgtgatcgtagtcactgcacgccaccctgacaacagcggagagttagagtggctacgggactacgggttcccgatctatttcacggcacagaaggcaaagcgaccattcatggaaaatcttggaataaaagtctctgtatgggttgacgacaacccgttcagcgtggataatgaccttcctccgtggacagcggagcaatacgacgcctaccttgaggcaaagaagcaacgagctatcaacagagggagtaaagcatgagcgagattattaaggttgaagtgggagatcgggtggtccttaaggcctattgcgatacatacactggatgtgcaaagcgatgggcgcaggcgcatggtcgtttgcatgaactgctagctacggggtttgtagaagacagttgggtccacaccgacgaactggccggaggcttgaaaggcaccgttgtgatgactgaactgggactgaaggaagagtgctgtgcagtacgtctagacgcctacactgaccacagggctgttgtagttgttgacgcttctgatctttacatcgcatgtaaggcagcaaaagctcccgtaagcaccctagacgaggccttcggttgcgaccacgactaccttatggaatctccggctaacgctcagcgactgaatgagtccgtcgagcagctacgaactggccaagtcgtagaagtggacgtgcctatgagtgtaaagcaagacgaaactccacctgtcgtagtgcatgtagtagagaagatttacgataggaaaggtaacgtacacctcattctacagtatgaggtagcaggggcgctaatcaggacggtggttgaacagggagaactcatttacttcttggatgaaatgcaaggtatgtacttgaccaagattcaattggaggtgaacaatggagttgtatgaccagtggcgtaagtatatgagcgtcgtaatcttagaagaagaagataatgagcgtcagtgcatgcggcttattgaggcagttggcgaactcgatccctatatccaagatttcctagattctttctctattaaaactgaaggaggtgtgtaagcatgagtcagagtaagcgcgatgagattgtagttgaagcacgtgggctagagagctacttcatttcccactggaacggctgggatgtgatggacactgcttgtctcggattttatatcaaacctgagtatgttcttgacccggatattcgagagcttgagcctagcttcttggagcttgatttcgagcgttgccgtttccgattctggggaaatgaagacgaaggcgtggacggcaaactcatggagggcaagttgcagattatgaccaactccttcgagtacgtcttcttcaaggaggtttgagtggctagacagacttacgagtctgcatcagatagggcggtcgaggaggccgtccgttctgagcttgaagggcggtggaagtgttctcttcataagctacctagagcccactatatggattgggcagcctgccggaatggaaaggttgttagctttgtggagcttaaggctcggaataatgaaatgcagaaatatcccgacttctttgtgtcccagatgaagtggctccatgggatcgaaatgcaaagggtgtttgacattcccgcattccttgtggtaaagtggacggactatacaggatatgtcaaaatgacagccaacggcgtcaactacatgagcatgggtggcaggattgaccgtggagactggcaagaccaagaagttatggtccatatcccgctgaaagacttcacacgtttataggaggacacatgaagagactctgctaccgttgcatgcatcttggagagcctgtcatgctccgtcataagacgggtatctggtacaagggttgtagtaaatgtggatcaggagtattctatggctaagaagaaccctgtattcaagtttctgaatacagtaaacaagccctcagtggagagggataaaaccaaatacaggcggaagcctaagcataaacagaaggagcgattaaatgaagaagggtgataaagtgaggatcaatgatgatgctgataccatcttccggggccgtgttgccactatcatcgcagtagacgaagagggttgcgttatcgacgttgggagttacgaggatgagagcggagagctgatcgagtaccttcacctattctttgagcgttctgagttgtccaagcaggcgtaggagtgtataatgaacggacccgagtgtagatggtgcggagagaaaactgaagctgagttcgtagacgttgggcttggatggacgcagcaagtcactggaggcatgtgtcaccagtgtggagggtacgagaacggttactaccagaacgacggaaggctcacagaggtcgagtttgccacctactggagtggtccgttcgaagattatgcggatttctcgccattcaatcatatgagagaaggcgactcgccatgaaggctacactgagaaaccacaatctgctatacatctacttccacacgttctcggaaatgaatgagtggttgacagagaacgctgtagatcagtggacagtcactactctgggctccggctatcaggtggctgttcctatggaccgtgcaatgcgggaccaatacgtctcggaggggggttgacacgaacacaaggtgatgctaaactccgtggttgtctgaagtaaggaggttttatgtccaaaatgaccgtggcccaaattgcggctatgcacggtatcgatctgtattctgaccacaagaccgcttgtccccaatgccggaagaaaggcgctgacaacagcggagacaacctaaaggtctatggtactgatcgtaataccggggaacacaaaggtgcctattgttgggcgtgtgggtacaccttgctctctgaagagcaggaaagagacgcccggggagaagacgaagaggagtggaatttcgtgggaactgaatttaacgcagagatcaacgctcaaattaaagagcaatgctcgtatgatccgcgtggttatcgtggcctgtccaaggaaacttgccagtatttcggagtgctacatggtttcgacccggagactggcgagattgcaactcagctatatcctactactactaattatgaactcactggctacaaacagcggatcatgccgaagaacttctcagagcctatcggcgagaccgggaaggattgcgagctttttggtcagttcaggttcaagaatagcaacagcaagaaggtgcttattgtaggcggtgaggttgaccagctatcagcattccagatgctcaaggagtatgatgaccggcgagcaggcggtaagagtgattatgaaccgactccagtggtcagccctactatcggtgagagtggggcgtggaaacagctacaggctcagtacgagtggctagaccgattcgaacaaatcatcctctgtttcgacagtgatgatgcaggacgagaggcagcagacaaggcagccgataagcttccgaagggcaaggtgttcatgatggaaatgaaccgtaaagaccctaacgagtatttgaaagctggccgtcagtcggagtttgtcagtgcattctatcgagcccgtacatggacccctagcggtattgtagggtctgatgcactcgacgctcgaatgtatgaagctgtgcaggttgagaagattcctctgccaccgttcgctaagaagctccagaaggctatggcaggaggcatcccgttgggccggattgtgaatatcggcgctgcatcgggcatgggtaaatctactgtagtggatgagttcactctgttttggatttataactcgcctcatatgccgggtactgtgactctggaatcggactgcggggagtacgcaatcaagctgctgagccgtaaggtaggcgagaaggcagacttgtacgagaccgttgaagagaaagtggcgttccttgatcggcaccgtgacgctcggtacgacttgtggcacaaggaagacggaagcccacgcttctatctgatcgatgaccgagacggaagcctagcagccctcaaggctcaaatcgaacaactgattattcagtttgagtgccgtgttattattctggacccgcttcaggatattctggacggattgagcaacgaagagcagtcggtattcatgcgctggcaaaagggtatgaccaagagccaccgagtgacgttcatcaacatcaaccacgtccgtaagagtggtggtggtcagaaggctaactcggcaggtgctgaactgtacgaagaagatttccaagggtcttcgtccatcttcaaatctggtgcagctaacattctgatgtggcggaacaaggacgcggagaacgagttcgaaaagaacctgattaacgtgaagctctctaagtgccgatggactggccgcactggaatgatgggcaattggtactacgacgttgagactcatacaatctgggacttggacgactatctggaccgataccctgacaagcgccgtgaacacgaggcttggatggctcagaaggaagaggaaggccgggacacggaatactaaggttgacagaggggtgatgcttatgtatcatccctttcgtcgtttacaggaggaaaggaaatgcaacaacgatttgaaacaatcgagcaatacctcgaatggatgggaaataacaatttcaccaacatgacttgggatatcgaggccacaggcctgttggatgaaacgtctatcgattacactgccagcccctacaagattaagcctagctacaaacaccactgcattgtagtggaggagcacggtggcaatattctggcattctacgatgggccgacctacgtctttgacgggcgagagtacactgagagactgccgaaagcgtcttccatgctccacactgaagaagttgtgactctcaaggactacactccggtagagtatattcacctgccgctgaaagagttcaagaactatgtgctcaagcgcaagatcaagcgcgtagtggctcacaacatgattaacttcgaccttatgtcgatgaagcttgtggaagatatggacttcactatcggcgtagagcacagggatggcggtctgactacgtggtctgctgacacttggatgggcaagcaagtggtattcgacgataccctcgttatctccaagacttgtaaccctgacctgttcggcggtcacagtctggataagctgtctcgtcgtgcaggtggtgacaccaagattgacttccgtaagcatttggcaccggatgttcgattcctcgacttcgcagccgatatgctctactactgtatctatgacgtaaaggcgaacaccgctgtatggcattggttgcaggaccacgaagattaccaactgtccgaccgtgacaactacatcaagaattggctgtccccgattcagttggagaagaaggttgcagagatcatcacctatcaggagcaccgagggtttgttctgaatgttgatctctgtgaaaaagctgtgaaagacttggacgccaagatggaagagcgtcgggcccgggtagagcctgtgcttcctcctcgaccagctaccaagaaattcatggcagactacacaccgcctaagcggcagttcaagcagaacggggagatcaccagctacttgcagaagtttattgagcggattggggctcagttgaaagagggtgacgaccggacgatgatcttcgaaggcaaggagtacaagcttccgcttcccgctgacgtaccgctgaagacggaaatgcctgctaagatcggggacacaactcacatcaagcaatggcttatgggtgagtttggttggattccatcagagtggaaagagactgatctgactgtggatcagaagaagatcaagcttccgatggaaaacatcgttgctaagatcgatcgctggctggatgtaacgtatagcacagcgtacaaggaagagcggctggacgggttcggggattacatgaagatcacccctcgtagcacccgcgcgtatgtacgtcagaggttgattgatcgtgcaagcaaggggagctgtaaggttctcactaaccctagcttcacaaagggccaagagaaagaaatgtgtccagacctcgaacgcattgcagaacagtttccgttcgcgaaggatgtgattgagtacctgacctttaagcaccggcgaagcgcaatcctcggtggcggcatggactgggacgaaatggaggatggagaggagccggaaaaaggttaccttgcaagcattcgtcaggacggcaggattcccacgcctgctgacacttgcggggctgctactagccggatgaagcaccggaaggttgctaacgttcctcggatcacctcgttgtacggggctgagcttcgagagttgtttggggttggagatgggttcttccaaattggatacgacttcgattccttggaagcacgtaaagagtcggcctactgcgatcagtacgatccgacaaaggaatattgcaaatctcttatgatggagaagccatttgacgttcacacaatgatggctaagcgtatttctgagatcattggtcgtcaatttaaccgatctcctgcgaaaaacgtaaaatacgggtgtacgtacggtgcccaagctggtaaagtggcaaaaaccattggtgccgatttgcaaacgggtcaactggtattcgatgcgttctgggatgcagcattcccattgaaagctctgaaggacgacctcaccaagcaatgggaagccaatggcaagaagtatatcattggagtggacggtcgccgagtccctactcgttcggctcacgctatcctgaacagcttgttccagagtggcggtgttatctgtgctaagcgggctatggtgattcatgatgtactactggagaaagaaggtctgaaggttgactttttcaaagaagactggaagaacaagccggaattctgccaacaaatgatcgcgtaccacgacgaagcgcagttggaagttacagctaagtcggtcagcttcaagatgttcccttggtctcttgtaggcggtaagccagaaggagaaaaggaacaggaggaggcggagaagaagctgaaagctctagctcaggcttacaaggacgaacaattggctagtactggcaaggtgtggagtgatatcgcacactacagcaaaggtgaaggcggggtgtttgtagcttactgccgcgctggagaacttgccacgaaggccgtgagagctgcgggagagttctactctactcctctggtgcctatcgagctgaccgctggctacatcgttggtcgatcttggaaggattgccactaaaactggcattaagcgaggaaaggggcttgacaggcccctccgcctcctatacaatggccacatattcacaacatacaaggagaaacacaatgactctggctttcattatctatctggtaatgaccgtattcccagccttgtcgtcggctggtagctttgccctgatcgtcaccatcatcgcatgggttgcaggagggttcgtttacttggcatccattggtggccgagagaattcggcagttaaagccacactcaaaaatcacctacggcccttgacgttcaagctgtttctgcctatcattgtaatcggccatctggtgccttcgtctgagacggcatggtggatggtcggcgggtacgctgcacagagcctctatcaagcagacgctactcagcaggttctcagcgaatctactgaactgctcgaagctctggttaagcgggctaagaaagaaactctgaaggctgttgaaggcagcagcgagtgatacggtaatcacagaataggaggtatggtatgaacacggctcgactctacgtctacggcaaatcgtccatggtaggaatcactgttgacaacaaggccaatcgggagtactatacctctaaaggcttcgaggtatcggagacaccgttagcccacaaaagcgtggctaacaaatacaaacagaaaggaggtaaataatatgtctggtgttattcccgggactatcgtcaaactcactcaagtgggatgtgacgtcaccgttggctggccaaaggaagcccgatatgtaggcgcatacgcagtcgcagtagatggacgcgatatcggtctcccggaaggggaaatccggttctgctcccttcattggtccattgaccgagacgtcaatgatggacttggagactaccaatcgatgctcgctgacaacgaccgcttcgaaattgtagcagttccgggcaagaagtattacgttaagaacgttgccaagcacagcgcacagatcggccattacttggttccttcggagccagccttgtacgtaggtttcgagccgtgctggctgaagagcatgcacgaaggggagagcccgttctgcatgacttttaaaggacgcgttgacattggcggtgaaacctctgacaagccgcagttccagaccctctaccctgagctggtactggaagagtttaaagaagaggcggagggcaaggttgaagctccggttgacgaagagaagaaagaaaaggttgcaaagcctgctgtaatgggttatgctgttctcgatgcagacgggagtcctcttaaattctgcctcactcgcgaagaagcccgagccaccaagcgctggtggggtggcaaggctgagggagtctcgattgtaaaagtaatcaaaggagaggaggtgcgttaacgcgcttctcctcttgcagaatccgggaatgtccggtatgatcgtcagtcaagtggctgacacactcgcccagtctagggtacttaaataggagaaatgaaatggcttttaaactgaacgtaaccaccaacactcaatccggcaacggcggcgtccgaaaggaagtcgattgggatgctctgaacaaccacgtagttgaagctgctggcactgccgctaaagcgcgttcgatcccgggttatatctccggtatcatcgatctcggcgagcaagagcagaacgatgcagaggttgtgttcactggcactgccgaagatgaaatccaaatcatcaaggaatatccgaacacttacttcaaggatggactggacaagcagactcgcaagcctgtacgtctgaagtgctggccgcagcgcgatatgcaacaaatcgcgatcactgtggacttccctcagatcgaggtagacaagagcctgtacctgaccggtaacagcaacaagtctccgcttcgtgtcctgtacaacggcgactttactctgccgggtcagaagactaagattgttggccgtccgtttaccatcaaggaagtgaagcacccgaatggcaaatgggcgttcgccaagaactccatgttgcacaaacttgctgtggctactggcgtcatcaacgaagacgaactcttcaccaaggaccgcgtaggcgagcttctgggcaaggtggctcagttccaagtgcgagtgtggatgaagccgggcaagaacgatatgaaattcctcactgaggatatcagtctggtcggtatggttcctgaaggtgttccggttcccgagctggacgagaagtacatctacggtgtcaacctgtatggcgagaacgacgaagaagcagtcaagcaactgcgtgctaacgtcatcaacaccatcaagcgagccaagaactacgaaggttcggatatcaaggcgatgatcgaagccgttgaagctgcacgcggtggtaaccgctccagtggcgacagcgaagagcaagctgaagataagccgcagacccaagctgcacctaaagtggagccggttcaaaccaacgtagatgatgacattccgttctaaagggcggtggtaagacaaggggcttcggccccttcctttcaaaatttcaaaggaggcaacacatgcaaatcaattttggtcccatcttccttctcgcagcaatcgtcctgtgcgttctgaaatctgccggagttctcgctatctcttggactgtggcactcatgcccatctggattcctcttgtaattgtattgtcgattctcgtactgtttcttgtaattgtaggtctgatttacgcattcggcgatcgtactaaactgaactttagctttaaaaagcacttccggaataagtgaggactaatgatgagtagtttggttattgttcgagtacctgagtacattctaaaaggccccacagtaaacaaccagttcagcggtgacctgtgggagcgaaatctcttcaaagatttgaagaacgctgcggagtgtatcattaaaggagagccggcttatgttgctcttcctaacaaggtaaaccctgacactctacaaacagagtgggacattcaggttgtacagttctaacccaaggggagcttcggctccctttttcattggagataaaaatgagtgaaaaggaagaggatatcgtcctcatcgacggcgaccttatcgcctttaagtgtgcaagtgtcaacgagacccgctccatcattgtcagaaacaaattgacaggagaagaggaaacttggaagaatcggacgacttggcgggagaataacaaagacgaagagggattcaacgaagacaacttcgaaattgaggaccatcaagaccccaagcacgtgtcctacggtatctctgttgttaagaccatgatcgaccgaatctgccgccaagctgggtgcaagcagttcaagattctcctatcaggccctgataacttccgtgacgccatcccactcccgaaagaatacgagattaccaagggtaaaaagaccttcactcgtggtggcaggtacaagggtaagcgtacagggcagattaagcctcttcagctaggtcagctaaggcagtatatgatcgaagcgtatgacaccatcatccatcccggagaagcggacgacttgatggccgaaatgatgtacaagaacggtgtaagctactccagaggggagactactcagcgcgtgatcggggctaccatcgataaagacgcagacggcactctaggatggctttgtaactacgaacgtgagcctgttcaagtcaagttcatttcaggcctaggatcgctctacagggactctaagggcaaggtgagaggcgagggacgtaagttcttctacttccagcttctattcggagaccctgttgactgctaccgacctgctgacctgtgcatcgggaaggacttcggagaagtggcagcgtttaacatcattaatccctgcacaacggacaaggagtgctggcaagcaatctacgacacctacaaatcgtggtaccctgagcctgtcacttacacagcatgggacgacacagagcacactaaagatgcaatcgatatcatgcaaatgtattgtgactgcgcccacatgcaacgttgggcgggggatcgggtagactgtagggctgttttggctaaactcggggtagacttaggaggtgcagaatgagtgtaaggcctcgcccttgggaagacttcccgggcatctggaagaccgaagccgcgttcttgagttgggtcagaggtggcattcgccgctatctctggtctaagaacccggtcaagcttgagtttgctaaatcccgaaggatcaagatagccaacaccaatgaaaagagcaagctcaggaaccccactgtatggggctatgtgtgcgagcagtgcgggaaggagactcctcaagctaacgttgagattgaccacaagacgggggagttctccctgaagcgagtagaggatatccaagcgttcgtggaaggtgtggtgtttgtccgcataggagatttggctgtcttgtgcaaaccgtgccatgagatcaagacctatgcagagcgttacggactcacccttgaagaggcgggtatcgtaaagcaagctattgcaatccagaagcagaaagggtatgataaggccttcttgcaggaggtgggaatcaaacccgcatccaacgcagagcttagaaaagaacagatcattgaataccttaagtctaagaaggagggtggatgaacgaggatcgggtttacattgtagtaagagacgaggcaccagagtacatggtgccgactctggttgcacatagcatcctaggggcagacatggcaatggttctcctcggacaggaccgggccgttccatcgacggaccttccgtcccgtccgtatatgcatgcagcggcaaaaaccgccattaagtgggtggagtggaaacagtggagcttccgtaagatcgttgtacgagtttctgacaaagagtacgataagatcaagcaaatccctttcgtatatgaggggtatgagagaaccatctgcaatggcgaaggctcctgcctagtagtacctcctctgagcaaagaggagaccccgaatgttcttaaatttgcaaaattatggaggcctctgtgagagagaagtttttgagaattatgcggaagctgcccatccgggtaagggcttcccttgttatggcttggattgctctgttcttctggctcccggttgcaactgcgctaatcgttggaattctagagttcttcgataatgcaaaagaagagttaagaaacggatactctgttttgatcgaagctgccaagggagcttaccagtgcattaaaacgggagaggagttggagtcatgaccaatttagctacgtatgttatacgccacaaaaagaccaaagagctttggaccactcctaaaggaaagcggcaatggaccacgaaaggaggggcagcccgagcttggagaaacgcatatgagagtactacactaggagcgtactatgctaaaagagatatggaacggtggcctgacctgaacattcctttgatagtaggggccgctcccgcacgtctggccggctgggaagcagcatcttttaaaaaccaatcagctttcgagattgttgatattgctgaatccctgaagcacgaaagccagttggtgctcgatctactgaaagatgttattgggttcgaagtgccagaccacatcggagacggatatgtccgactcaccattaaaacgtccacatacgacgatatcatcaaactactgaaggaggcaaaatgagcatgactgacccccgagcgtatttcatcaaacaggagctggaggaagcaacgaagcttctagaaagagccctcaaccttctagataacgtccattgctacgatacagatgtatacgaggacattgcagcattcctctacggtcaagagtgcgaggaggaataaggtgcagcgcgatattagtaaaactatagcagaacttcgggacttgatcgaagctgtctctatgctcgacgaggccttggttatgatgcagaaaaacggactatatgatacggacttgtacaaacgtattgatgcgtttttgtattatcaaccgggcgagggcgagtgggaggaagtagaatgagcagcaagaaacactttgtaatctctgatacacaatgcaagccgggtatcagtctggactacatggaagctatcggtaagtatatcgtagccaaacgtccagatgttgtgattcacatcggggatcactttgacctcgccagcttgtcgtcttatgataagggtaaacgctcctctgagggccggagatacgccgaagacgttcaagtcggacgtgagggtctggacaggctgttcaagcctctgtgggagctacaggagcgtcaacgggctaatcggaaaaaggtgtaccaacctcggttgattttcacactgggtaaccacgaagagcgagcagaccgagcggccaacgacaaccccgaattgtacggcacggtcggaagtgaggaactgggtattcaggattatggttttgaggttgttccgttcctgaagcctatcgaggtggatggcatctattacgtccactacctacaaaaccacttcactgggaagcctctgggtggcacagcgaacaacatgcttaaggctgccggtcattcgtttgtcatgggccaccgtcagcttctggactgggcgatccatcctacaattgacggaaaacaaaggctaggcattgtgactggagcgtgctatcctcacgacgaggcttacaaaggctatcagggtaacaatcacttccggggttgtgttatgattcacgaagtgaaggatggttttggtctgccaatgccggtaagcctagacttcatgatggagaaaggaggtttcaaatgacggtttataagttctggtgtgaatgggatatcggtatcaatgagtgcctgtggcgagactactaccagatggaagaagatgtagctaaagccttgtcagattgcgggattgatgatactattgaggaactggaggacgcaggcctgctcggcttcgactctgttaaagttatcggctaattaggtaataggagggcatatggctgagtttttccttggggcggcccttgcaggcttgttctttatgtttagtatcactgcgagctttaccgccgaagatattgagaaagtgacttcaacatgcgagaataacgaaggcgtcaagtatttcggagttgacttcttcggagacggtgctgtacactgcaacagcggcgctattttcaaaatcgaccgcaaatctaaataatcgaaaaggagatataaaatgactgatttcaacatcacccctgagcaaatggaagaagcaatggcaggtatgaaccctgagcagcgggctctggtagagaaagccttgaccgaccgtaaatctctggaagattccatcgtgaccgaggacggtgaactggactatggcatgcttgcacgacacatccgcaccagcttgggtgatctgcctctggtaatgggtggccctgacttcctgaagctgatgatcttggttgctgcgatgccggagaccaaagacgatctcctgactctgcacatgaacctgtccttcattctggactgcattcgtgaatcgattagcgacgaggagtaacaagtggccgaagagattgtaaaagaagacctatctgtcgacgatctcatggttgactcagcagggctagatgccctgctggccttcctagagagtcagtttaaaggtccgaagggtgtactgaagggatatgtcactatgagagtgatgtgcgctaagatcgagagtcttgacgggtttcaagagttgaaagatatggaggtgaactttgagtaacgatatcatcaacgttcatgctgggcaaccgatttctctggtgcaacggtcaaagaatcctatcaatattcaatattgggacgccgataccatcccttacggaacagtcttggttgttaccgagaaaaggggtgatatacgaaagggagaattggtcgtaaggctggctagtagtgcagatgatgagcactctgttaaggtatgtagattctctgatttcttcctcctaatggagaggggttatgacgcagccagtctcggcgacgttaaacaagcgtatgatgttctgttcgaagatcacccagtgactacctttgttaactgggatcgggctcagcctttgacaaacagtgagcgctactacggagactttctgattggcggcgaccctaaagggatgccactattcaacatggctgttcttaaaaatgttctgtcgccttacactgccgacgatgaggaactttcagctatgtctgggaatcccgagacagtagagcacaaagaagttgacgaactaagtgagagggacgaggctttagccgaggtcgacagactcaatgaagagcttgttgcactgggtaagaaggttgtgttcgccaacctagaagattacctaggcaaagaaaactatgccacattggaagctatggctaaccacaaggaggctgtaggtagcggaggctcctctagttactacactgtcaaggtgaacaaccccactacgaaggctaacatgccgtattttgcagagtgcaacgatatcatcgaagcgctggatatgcgattcggtcaaggcaacatgttcaaagcgttgtggcgggctgcggcagcacagaacctaggcaagctgaaggccggtaacgatgttatccgggactacgagaaagtcatcttcttcgctcagttggagatcgataagattctcagagaaaggggttgacattctccccgaggcttgcgataataggctccaagttgaaacgaaggaggtgtgtagatatgatccagaaactaaaacagaagctcatgatggtgcatcctatcctcgctagcgagatcgtctggtgcctcaccttcgcaatgcttcagtaaaacaagggagcttcggctccctttattgtatcaaagatttaataaggagagtttatgcaaatttctgcaaaagtgattcaacacagttcccggatcggcctaggtacgaagaatcacagattcatcactacattcgaactggagtatcctcggtttattcacagtgaacttatgactcaccgactttttagtcgaaatgctgcaagtagtcgtgccattcccgttgcccatatgatccgacaggtggaagagaatcctgcgatgcctgttcactggggaatgaatcaaccgggtatgcaagctgagttcgaactgagtgagtgtttgcaacgtagctctcagtacctgtggaagaaggctgcaaagagtgcggctcggatcgctagcgcactaaataaaatgggactccacaagcaggtggttaaccgtctccttgagccgttccagatgatgaagaccgttgttacagccacggaactagataacttcttctacctgcgttgccataaagacgcacaaccggagatcaaggttctcgctgagaaaatgtatgaggctcttattaaagcgggcccggcagaggctctatatgacggagagtggcatgttccttatgtgactcggttccgcataggggatggtaagctgcgttacgcagattgtaacgggcaagaactgagcgtagaggatgctattaaggtatctgctagctgctgtgctcaggttagctataggaagaacgacgagactctggagaaagctcttgtaatctacaaccgattggtagatactaagcccgttcacgctagcccgttcgaacaccaagcaacaccgatgctccgcatctcggacaatcaaactggatgggaggacggtgtgacgcacttggaccaatatggtgacctctggtctggtaacttccgaggtttcatccaacatcgtcaactaattaaagggcacgtatgtaatgagtactacggccaagaagaggaaggagtttaaaaatggcagaatataacctgagtctggaagacctcatgctggtcgatggcttcaaagaggcgttccagagtaacaatgagaaggtagtaagggagcatctgtggactaacggcatggatgttaaaaactactcgtatgaaatggttttctgtcagcatcgcaccctgattggccgagtcgtagagggtctacgattctctggctttgagcgtacagacaaggagtggctgagcctcggttgcgcctctctggaagctcatattgcagcgtgtgatgatagtaatctacggttcactcttcgtaagatgcgaccagagggatcgacagaggcaacgttccacaattaatgcagtaggagtagatatggaagttacaaaggctctcgtagatgaggccgatattttcaataagatcacacaaatcaggactccaacggagtcctatgcccggaaatatccggtcattgtcgaactagcaaaccagcaactagaagagaagttgtggttctctagcgaaatgaaggtagagctggataagttgaacctgaagtttaagttggaacctcatcagcttcacgctgtaaagactgtccttcaactgttcctcaaatacgaactgatcgtaggcgaggagttttggatgggtaaagtagtccgaacgttccctcgcccagaggttaaactagcggcttcgatcctgtgcatgatggaattggcagtccacgctgaattctacaaccagatcaacgtagtgctggggatggatacagatgccgactacgtggcgtacaaggatgacccggagcttatgggacgtatggagtggcttgagtctgtgctaggcgacgaagacgatgttctttcggtaattatcttcagcctaacagagaccgcccttctgttcagttccttcgctatcttgaagagtttccagtgcaacgggtacaacgatatccctgtgatcgcacgcggggctaaccagagtgctgtggatgaagacttgcacggtgtagtttcggctgagatcatcaaccaatactacgcagagattggtcgaccattgtctgaagatactcggcgtgtcgagaagattcgacaagctatcgaccatgtatatgctcatgaatgtcgtattgtcgatatggcgatcccgggcggagaacttaacggcgagtcggctgaaaactataaagcgtttgttcgttatcgtttgaacgtatggtgccgtcgtctgggtctggaagatcatttcgagaacgatgacactccgatcaaagattggttcgaaatgaacacgtacgcttacaaaatgattgacttctttactccgggaatgggcatggagtacgaactggggtgggatgaagaggaactagcaaaggcttgggaagaggagctgaaatatgagtaagagagacacattcaactattccgaagctaggaaaaacagtcaagcagcaggagagactcctctgtggtatacgacggctggctaccagttgttcatgaagaaatattcaaatgagggagagtctgttcgctctcgttttgagactgtagccagagctatggctcagcacgcccctacggtgtatcctgagtggtgggaggaggacgaatacactagaggcaaggactgggaacaggtattcttcgacgttatgtgggacggttttgtaagcccatccactccgcttctgtcgaacggtgggctccgcaagaagggcactacggtatcctgtgcaggcgggttgatggacaacaacctctatgaccgttacaatgtaatgacggagattgcagtgctaacgaagcatagtcacggcacaagcttcagcctgaccaactggccatccgaaggcgatgccattcgtggcggagagtcacagggtgttatgcctgtcattcgtgacgttatcaacgtcatggaagaggtcgcacagggttctcgtcgtggtagctgtgcctacagcattaacccccgccacggggacttctggaacgttatcgatcacctgtacaagcgtacagaatcgaacaacgtcggatggttgctggacgacaattggtgcaaggctatggccgagaaagaccctgaaacgctgaaacgatggaagcggatgatgttcgttaagctggcaagaggcaagggctacttcacgttcattgacaagatgaaccggcacctcgcagagccgttcaagcgagcaggtctgaaggtagaggcatctaatctttgccaagaaactgtgcttccagctaatgacttctacacattcagttgcgtgatcctaaactataacctcgaactctaccgttcttggcctgagcatctagtgttcatcgggcaggttatgtcggattgcaacatcagcgagtacctcgcaaccatggacgaagttagcattcaggaccgaagggctctggagaagatttaccggttcaccaaggacttccgagcacttggtagtggggttctaggattccatactctgctccagcgggaacgattcccggtcggcagtatggacgctatgttcctgaacaacgccatcttcaaagggatgaaggagcaagcggaagcttgtaacagttggctagctgaggttctaggggagccagagggctgccgtggactagggaagcgtaatgccactacaatgatgatgccgccaactaaatcgacggcagaactcatggctggggcttctgagggcatcggactggacgttgctatgtgcttcaccaagcagagcgctggaggtgaattcttccgtgtcaacaaggtgttgctggagattatccaagagcgaggccttgattgggaagagtgtgcaaggcagatcaacgaacgcaagggaagtgttcagcacgtagactggctaaccgatcatgaaaaggctgtattccgtactgcctttgaggtgagaatggaagactacctacgactgtgttcccagcggcagaagtacatcgaccaagggcagagcatcaacctttatttcacgtcgaatgactcgccggcttacatttcgtacatccatcgtctcgccatggaagacccgaacatcctatctctgtactacatctacagtatgagaggagcgggagatatctccagaacagaagaatgtgaaatgtgcatgtaaaatcattggcccggggcttgacagcttccgggcctttgtgtattctgagcacatcaaaacaaggagggactaaaatgaacaaattctctgaagtgtactacacttggagcgcagcgtgctctcgtacaaatatcttgatagatatgggatggactgctacaatccgtcgagacttcactggcgggatcaaccctgtatgggttgtggagttcacgcgatgaacagcaaactccgcaaagagttcgataaatggtggggacaggacgagcaagaagaacttcgtaaatcctgtgccaaaggatgggcggaatatatctggatggctagtcgaagaaaagtgagtgttgagcttcccgcgccagaaggcggatttatcgacatccaaaagtacacaatcaatcgctgcaaagaagctatccgcgaaacaggactggaggtgttttaatgaaagaatattttaaaaagcgactaatgcagaccagtgaaccgttcgattcagcgacgcaagctatggacgtagcgattgcgtggggaggggctaagtactgcgaattcacttgcgtaactgcggataatcgcgtcatcagcatctgggagtacaatgacgtagagcctgataaaccggtattcaatggacagcaacgaatcttagttccaacttttgaggaggtagtataatggaacaaactattgataaatctcggtatattgtgcttgataacgaaggtcggcacgttctgaccttgtgcgagaaggccgcctataacctgcttaaaggcgttcagtggacaaaggacaagcatggtcaaatccatgtaaatggtgtcacaggcgttgaactcggagttcgtcaagggattatcgctgaagtattcctgtatccgggctacatcatcctagaagaggtagactaatggatatgttcgataaatacatgcaagttatgtatgaccgggacgctttctcaaggcgagtcggtgagttagaaaaagaggtagccgaactcaaggctaaggtggctatcgctaagtgtgatatgcgtgtcgtgaaaaccctactggaagatatccaatgggtgtatcaagacgaagctatctatactctaccgggctacgtttgcccttgttgcggggaatctgcaaactatgggcatttccaaggcagcttcgataagagcccctgcctactagcttgtgtactgagccggagtgaagcatatgaagcctaatgttgtagactcgctaggcattaacatgtgctacgcctgcggaggtaaactgtacgtccgaggagtatgcactatctactgccctgactgcgagaaggcagagaaagataaaccgttcgtcaggatgcagcttctacaggatatcgcagacagtaagaggcttgacacagaataatattctttgtaagataagcccatcacagacaaggaggagccgagaatggccactacagagaaaattattgagtacgtcgaggtgtgcatatatcgcttgcaggaggacgtgatggcctattctaagggcttcagggacagagccttgtctaatcggacaggctacattcacggcctgattaccatggctgaaatgaatgagcaagtgagtatcgaagactgcgacaagctccgagctaatctgcgggacgcttctgaagcagtgatgaacacattggacttttaaagtcaactaggaggaagttatgataaaagattttgtaaaactcgttggcttgtctgccgtagcctgccttctgcttgtatgtattataggcatgtttgttacagttctgcacagtggggcagagattgttcaatctcagatggaacagaaagacattatcgtgtctaccgatgacggcaccatcaatctcggtcgctccgtgaagagcgagaagctgctgtacagcatgtgcatcaaggtggaagaccgtaagccagcttgcgaattcaccaccaaggataaggtagtacatgaagtgcggcaggtgatgcgcccgggcgaggctactgcacgtgacattaagattgcagttaacgcagcagtgacgtatactggagagaatggtcagaaggctacctccctgatccctccgaaaggtgaattcctgccggcaggtactccgtcagaggtgcatatcgaaacgattgaccgcttgttcgacagcgtgtataatgactacaagcaaaacttcagcaagatgtgaggaggactcatgaaagcacagcctaaagaagtagagaccctatctttcgacaagcgacccaaggccggggatatcgttcgactgcggtccgatggcaaggcttacgaagtgtgtgctgtgtatccgacagcggtaggctgggaggcggcgcttcgaagcgtgtacgacaaaaccaagactgtcactgtcggcatggagtggtgaaatgtccgcgactaacaagtgcgtcaacttcctccctgtcactccggacgggcgagtgatcgtccggttcggtaaaaagaggttaggatggctcggtaaagagggtaaaaagtggtattattacccttatggatgcgaaggcaggatcaaatccgaaggcttcaaaactctgatcgatattaaggcgtggattaaaaaccccgactcggtttggcccgggcccctagcttgagattgactaataagccgacgaatggtacaatgggatgtaggaaattccctactcagtataaggaaactagcaatgactagccgctggaaagaggccgtgtatcgcaagtactcggtacgtcgtctgcggcaggaactcgaagagttcaaagaagctagacgctttgcaccaaatcaacgcatccgtgcatggtttgatgctcatatcgaatttctagaacgccacttggctattcgagagtccggccaagcctacccagacgaccttctgtaattaagtgttgtaggtagagattcaaatcatggttagtggcaaggacgccacactttcagcccgcccacaaggcgggcttctttttgcctgcaattcagggttgacttggagtaccagagcatgtagacttaccccgtccaacacaaggaggaataaatatgaaattcaatatctcaagacagttatgggtggctaaaagccaacggaagggcgattacaagggaacgcccttggcgtacatggctcaagtagacttcaacaaggacggaagcttggcttctagcttcaagaagaagcagcagacaggtgagggctgggcaggaaagagcgctgagacgtgcttcgtagataatgtcccggtaacggggcacttcatcggcgacagcgtggagcgctgggtgaccgagaacaagtacttccgtgtaacggacccgcgaggtttcgttctggaagtcccgaccgggaacatctctaccctgctattcaactgcactgtagtcaagggagtcattcaagagccttgtgtgtgggttcggatgggttctcagcacgttctactgccggaaggttcctctctctacaaagaggctgtaagcttcgtggagcggaaagagtcagccaagaccgttaaagatatggttgcaggggatcgatgcaccctccttagtaacggtacagaggcgaaggcggaggccatctacctcggacgggtgaaactcacttggcaccttctggctcaaaagggccggtactctaaccgtggacgtggcgggtgggcttatcgctggggttaccaccatctggagcgggagttagatagaaaagaattcaccgagaaagattccaagtgggttagtgtgtttgctaagaaactgagtctcggtggacgatggaccctcgacttcgttctatcgccgaaggccactgatattcagtctgggacagttccagaggaacttgagaatctggacttggtagatggtgtaatgtgggagtatgacggagaggatacccgcccaatggcctactactattctgtacctgatagggtagtcaagtgtatcaacgtagacgaccccgcatgggacgctcgatcctacgatgaggtaaggtggactaaagagtggactgtagtgggtgccgagtggcgaaaataagccaccattattttagaattgcccggcgagagccgggctttttcatggcaggggttattttcaaattatttttagatttctgggagtttcggccaatatgggcaatatgaaatttctcaggaaaaggctcagaatgctcgtataagagccgttcgagtgtaggtatggtgagctactacttagccgtagaaggacagtgtaacgcttaataggagggttagaatgaagattgacaacggtggcgaatatgcgtattggctggcggatatcaaagagtttgtttctcagatggatgccacagagatcgagaagagggcttgtatagcatacttaattagctggtatcagcgaagagtactgcacagaattaaacgggaggaatacgaggagatctaagctagggaccggatggatttttagggactggatagattttcacagactgcaaaattgagaactgggcagatttttaggaactggacagtttttcacagaaggggatttttctacagaggaatttcccctgaaatttagccggatttctcagaagggcggatcgttagcaggctatctaattggttagcaagctacctttaatcgttagcacactaactaaaaattcctaggacggacctcagttggcacgaacgttgcaagcccgcaccagtttcccgggcaggcgtaggcctcgactatccgtcgtgaaggcgatatgtagttggggactcgcaccccgcgtttaagatgtgcccattctactatgacagacagctttgtcaacattctttttatggcataggctttgcaattgcaattaacatgccaacacaaatatcaggctcctccggtgtttatctccggtgctcggcttccagcctgcgttgcccgcatgcctactattatacacaagctatcaagagaagcaagaaaaattatagagaaaaatctacacaaaggaggttgacaggcctcctttatatatgcacaatgatctcacattcaacggaacgtcaggtaagcatcatgctacatagtgaagcccgggagatggccctacaagagatgggcaagtggagtctcctcgaacaaggttggaaattcagtttcaatctcaggatgaaacggacgctgggacgctgtaatcatactaagaagctcatagaacttagctacgggtatgtagctgctaatgggctcccggcaatattggatactatccggcatgaaatagcccacgctaaggcgggaccggatcagggccacggatttgtatggaaagagtggtgcggcttgattggcgctaaacctcagcagtacgccagcacaaaagaaaaagtagtcaatttcccgtggcaactggcgattcagcacgactccgggcacttagagcggctcaatcactacggtttcagacggaccaacatggcgaaaaagcaggtacgcgggcgtcctgagacaaagggcagactagtttgggtgaagagtgaaaataagggttgacagcttaggccattcgcgtagaatggccctcaagcaaagggaaacaccctgagcaatcacgaaggataagtagatatgaaagcgctttgtaatcatcgggcactctacgcagcttacagccgtagcgagattgatcgcgttgcggtagacctgaaccgttactttcctatcgagaaagatgatgaatgggaagatggaccgtacatgtaccgccgccggacctatctggtgaagcattcgaagggcatagcaaggtggcacagtctctattgcaatgggaccgtccaaggcgttggcgtaatcttcgacgtaaagtcgggcgaacctttccgcacagcataaggagattcagaaaatgcaagcttgggatgtgtatcagaacggccaattgatcgatactgttttcttcgatatcatgtgtgatgccgaagaggtgcggaaatcgctggtcaatcacgacggatactcgtctgatactactgtagaggaggttgagtaatggatagtctatctgttaaaatcgttctgtcggaactgagctacaaggctctgattcaagccttcgccttgcttggccgaacgctcgacctagacgaggggttggacgatatacttaatcttattgcggatgagatcgctttccgcgacggcctgccgcctttcgcagacgactgcgataaaacagaatggatgctccgtcgatgggaatcgctcccggtggtatcgtacaatatcgggcaggacggaccgattgtcgctcggtctatcgaagtaaaaacggcatgaggggagaactgatgaccgtcagagtaggagatatcgtggctatccggggcgacattcggaaaaagctcgacggaacatgccaatacacgcccgaacaattggtaggtggtaaattcctcaagcatgccggcacgggagaaatatggactggccgagtgagtaagatacaaggtgatatggccaaggtgggaggggcttggcgcgggatcgaattctatgtgctcattagtgaaataaacgcttgacaacctgacccactagctgcaaaatagcactcacagacaacgaagacgccgataggcgaggagaaagcagatgcaaatgtttttcaaaacccgcacccaagcccgtgcaatggccaccaacggtcgcaaagtggtagacaacggggctcaagctgaaaagcgctgggctgtcaagctgaacaaaaaggaggcgaaataatggctaagtctgtcagtgtagatcgcaagcgttccatcctcgacgaggcgaaagacggtagctttttcagtgtggaattcgtcaaggcagacggcaccgttcgaaagatgacgtgcaagcgccagattaaatcggcgtatgctaacggacagtatgccactcgcaaaccgaccagcgctggcaagccgcacctgtataccgctgctgaggtgctgaacatggaagagggtaaatccgctttccgtacgatcaatctcgaaacccttatccgtgcgaaggtgaacggaatcgagtataaattcgattaaaagcttgacagcctaggccattcctgtagaatggccctcaagcaagacaaacttaaacagaaaggagattaaaatggcacgttctatcaaggcttccgacttcgattccgcttaccagttcgaggccgccaaacgttccgaacgtaaagagtcccgcaaatcgcgtgacaatcgcaaagctagccgaggccgagctttcgacttcagtagcgatatgtaaggtttgtgccctgccggcaggcttaaatgccggcaatcctaagcccattcgtcgagtggttttaggattctcaaccccagcggagataccaaaaatggttcgtcaatgcgtaccctgtcccgatgctcgccatgctttttgccttgcatggttgttcgccatgccggagttcgccggtctgcccgctcaaaaggacataaaactctttaagacttcgggacaatgggcggtatgttatggctagacgacagcggctcccgtcgtgggttcaagaccagaccgaggatgaaacgccgctgagggacaggatagacccctaccttagcaagcttggcgaagtcgataagctagagggacaattgcgacgggtcagggatgcaacggacccggacgaatacaacgaaatggctaaggtactaaaagcccgacgccggaagataatgaagcaacgtgcccgggcctacggtctgccagaggatgagcctaccaatgtccaagggtacagcgtaccggaagaggttcaccgtagagccatcctgttaagcagtgtaaaaccttggatgttctggaccatcctgtctttctcgatttttgtgtggtttgttttgaaaaacagttgacaaggttcccgcctcctgtagaatggtcagcaagaaaggcggacaggccgcctagctagataaaggataaccgtcatgcacttcgttcttaacctcgtttccaaaaacagcaaaaccggtcccatgcctgttagcacgtctcataacggcacctgcccggatgcctgccctctcaaggctaaaggctgctatgccgcttatgggcctactgctattcactggaaaaagctaagcaagggtgaacgtggcgtagagtggaaagagttccttaagcaagtgcggtctatctcccgtggggatttgtggcgtcataatcaagctggcgatctcgtgggtcaggatgacgttatcgatgggatcgccctgatggaactggtgaaggctaacaaaggtcgtcgcggcttcacctacacacattacccgatgaacaatttcatgaaccgccagcacgtattgtcggccaatcgtagcgggtttactatcaacctgtcgggcaacaatgtagcgcacgccgatgaactggccgacctgaacatcgcccctgtagtgactattctcccgatggacgcggagaatgtaagctttacgccgaaaggacgtaaagtggtagcttgtccggctgagaaaagcgacaaggtgaattgtaagtcgtgcggcttgtgccaagtggccgaccgggagtatattatcggcttccgtgcccacggcacagcaaagaaaactgtcgatctcattgctaagggttaacacaatggacgaatctgtttacgcaccattcaatcagtgtaagatgatgggcctagaacgaaccgtgcggagcctagcggctcctaacgggtgcaaggtagtcttgtatcaggaccataagaacaagcatagaatcgtcatatacgatgccttagggcatggaatgtctggggtcatggtgcaagcggatggggaaattcactacaaggaaactcgcaaggctagccaagggcagaatctgacaaggcagctacaagctcagctaaccgcatggggagtgaagtggttcccctctcagtatcagacagcggcgggcgcggcctgctacaaaggaggcgagtgatgcggcagcttaacaaatcccagcttaaggccttggggcctaagatcgacctagccttagagctagcttctactggccgtggtggtctaatgaatggccacggctctacctgctacattgcaaacaaagccgggcataacattctgcgggttagctaccataactcccgattcgttgcatatggtgctgagagtgtccgggtgactgggaatgtcattgcagcatgggtggaatggaagggcattaaccgggctgcaatcaacgctctgagtgagtacgggtatcatcctaacctgagcatagggcacaacgatgctcttaagactctgcgtgatatcgagcgttaccagtgacggcctcttactcgacagagaaacggggccagaggtgggccatcatccgtactgagcccggttacagaggtgaccgggtgaccgtgctaggattctgtatcaatcaaacgcacgctcttaaaacggtagccaaattccgggcttggcaagcgctaggctggccctacacactgaaagatgacagaaaataaatgcttgacagcctaggccattccagtagaatggccctcaagcaaagggaatcaccctaagcaatcactaaaggcaggaacaatgaaaaccacagagcaacggcaagcaatactccccggggccgccggcagtcaagcgacgggcgcctactacccgatttactgggatgaccggggctacttcataggcccgatgcgtcactggaaaatttacaatcgctgcgtctgaagcatcaagccatgcttctaataaccaaccatctggagactcaaaatgaaagctgtagcccagttcaaaagtgaagactacgaaagcggtgatagccgtactgctaccgtctatgaggatgtttatggatgctacgtcgtgagcgttttcggaactagcttgagcgaacctgtcagctaccattggggtccgttcgagtataaagaatctgcaatcgatgccgctaagtctgctatctaactgaaaaggggccacagaatgaaaatctccgctattctgaaaaataacctgaagttttacaagaataattcgttcatgtgcgctctggcgttcgataatgtgtccagaaataaagctaccgaggtgcaagaatttatccatcagctactagggcccttcgttaccttgcacgctaagctcaagaaagagataccgggttacgaaagagccgtatatgatgatgagccagaggatgaaatgactttctttgtatcggatagggcctatcaaatgcgttgcttgtggtgggaaactgtaatcgaacaactagaggaacaagggcaatgactcaagctaactggagcaaaggcgtccgggttgtcggcggaaagcgggatggtgagattaccctgttcacaagcgcacacttcagtgaatcgctaggcttatgcgagggtgatccttatctggtagaggctttgccgatgcccgccgcgctccggctgctagtcaaatggaacaagctgtgcagccgaatgaagcttgactatcggtatgaactgctgtagtctgcaatctcaatcaaaacaggaatgctccaatgtcgattctagccttaaccctgaccctttgctctgccgttcaatgtgatgattacattatcgatcactcactcccgggacaagccgcagagtgtaatgctcggctggtggaggaggccgaggagtggggcgatgcttgggtatcaactaacgctgatgcccgactgacccgctaccttagccggttcaatattcaagttgaccctcgctttgttttcgactacgattttacctgccaactcatcgcagaggatgaactaccatgaacgcgccccatctttccctcaagcagtaccgtcaacgtgccgctgtcatcgtccgccgagtgaaatactatgaaaggcgctggctccggaccgtagagtttttctcaggtgctgccgctcagaacatcgcagaacgctttgcctacgctgggcatgctgaagagcaaatgaccaagctcaaggctgagtttgcagccttcccggtggaggtgaggctagatgctctaggttggatcaattggaatactcacaatgacggcctgctagaggagtggattcatcaggaaaccgaccgagccatcatgctcgaatatgacgaaaccacgtggcgtcctgtagcttgctgggaaaccactgtcgatgctcttcccaagctggcaatgctgtaaaatatcgcccgttaggctgaaataatgcttgacgggcgtttttgtacctgtagaataggcctcaagaaaggaaaacagccgaaaggctcaatctgaaacccggagatcgataaaatgctgctagttcatggaaccactgcaaaaggcctgaaagctatcatgaaccgtcgaggcaaggagggattggccgcaccttgggacgtttcggaccatgacggaatgtcctacttttacaacgtaggcaagatggagtggcacgacgaagaggagtatgctaaggcagaatgcatcgttcgttgcctagaacaggcccaattgcagcaggctatgatggccgaaggaggtaaaatctatgctctggtggttgacattcccgaagagtttcaggattgcgtagaggatgattattcgtgccctaacgctagccaccaagctagctgttttccagaggataattttgatccggcatggattgtagaagtgtatgaggcagatgtgagtgtatgggccatccctttcatcgtagccggagtctcaggtaattctatgttccaatcccaccaactacctgacaaactggtggcgatagcggagtcggtggcgcggtccagtgacatagacacatacgaagctttcgagatcgaccattcacaggtggagctatctattctcgaaaatttcaaagataacgcttgacagtctagccaactagcgtagaatgcctagccaaggggtgcataagcgccccacctcgaaaggatacagaaaatggccatcgttgatcgaaccgcaggtaatgaaagcccgaatcactgctacatcgttactggcagcattggaccagagtttgagccgaccctgttcactacccatgcgctggcaaagaagtatgcccagcagatagtgaaatacggtaaagcaaacgacgttttcccgccttttacgcctgttatcgagacccggcacaaggcagatatgaatcggttcactgttcacaacaaaatccccgaataggagacgtatctatgaaactttctgaaattttccaaaaaggcctgaactatgcaattgagtacggaatgccgtggtatatgtgcatccgtctccgggagattcatttgttcccctcgcccgttgaaatggcagttaactcggtcatgatgtctgccggtatctcatcaaccccagagggatgcgaattcgccggcgttgatgactatttcgaggaaagcggcctagcagccgcatacaaaatgaacaatcaggaaatgtccgaatacgggcgctcatcctacgcaatgtgggtgcaattttggttcttcgtaatctttgacttagcccgaaaagggcagtagaatgcattacaagcgtagaacagccagcaaataatgtgatctagagggacggtcatgggtgacaaaactgtagtttatcgggtggagtgcaggaacggcgagggaccgtatgttaactatggtatggagattgatacgtcctccactcccgagcggcccgtaccggagcatgacgggatacctgatgttcgccattttgagtatttcgccttcacgtctcctaaacaactagatgactggttcggggactactacagcaatctgaccgagcactccagcgcctcaatcaaaatgtatgaggtggacaggcagcatgtaaggactggtctccggcagtgtgtattccgcagagatgcggcggtttgcgtcaaggaaatgactattgaccaatgggtaggcctgcttaaggctggcatgatctctgcggtagtcgtacaagctctggccccgatcccagccgaacaactatccctagacctaggggacgatccggcctgtgaggctcagaaagaaattttgaaaatgttcagtttatagggttgacagcttgggccattcgcgtagaatggccctcaagcaagacaaaccacaaacccggagactcaccatgaacaagccaatgaatactttcgcatacgcccactacgtcgcccgcatggacaaggcctctggcactagcctgccctacgccaccctgttccgcatcgccctgcgtaacgcctaccgcaagccgggtgtccgccagtacgattgtgcagcactcgtcgaggatatcaaagcgcgtgaactggtccaaaagcgcattcgggctgaaaaagcagtagtgatggcggcagtaatgcgtgcaattcgtaccggcttcaccgttagcgtgaaagatggcagcgatggcgagtgggtagtgaaaaagtctaccgatatcaaggaaatctctgatagcctgcaatctaccgacgaggatatcatccgcttccgcaagggcgacggcccggacaacatcgtcggctctatgtgggcaatctacggtaacagcgccggcgaagtgatcgccgactggactgataatgccaccatggccatgattatggctccggctgagcggaagatggaaaaatacgctgaattaggtatctaatgcttgacggggcccgaaaagggccccataatgcacccataccagcaaacaacatcaggaccgccccgatgagccagatcaaaatccaagagtatatcgtagccgagatcaaggttaaccattgcgctcacctgcgcaagggccagaccatccaagcccgcgatgctcgtagcagtgaaaagtggattgcattcatggtggaacgcgggtatagtgcctctgaagccgctatcctgttcaaagatgcacatgatgtggcaatgctcgaactggcagcctgaaaaaatcctactaggagtactgacaaatgaaacgccaatatactgattcctaccagtgcaaagcaatcgacggcctgatgtctatctgcggtggtaagaaagctatcgtacaagtgtggccgtccttgaaagcctctcgaaaccgccggctgaaaaagatggtaaaatacattgcccggtcaggatggaaaccgtaaccaactgattatcacagccccggcttgccggggctcacaataggagataaaagcatgaataccctgattatccgtttggattccgcctacagcgttcaaactgtccgtagtttccttatggaagctgtagagagtattcgaaagcatatccgggactacgcggttcatgacgaatacgattcgggattgagcccggtagcacccaatcatcgacttgcaatcgtcaccttagacgaagattgccgagtgtttcacattcaatgcgagtcacctgatctttatctggcgaaccctcggatcgtgtttactgatgttgaaagcccggcatataccactcccgtgaacgagatcgaagagtatagttacatgaccgcatggcagcatatacgtcaaaaagatatgacagcaaaagactacctgtcggattggtctatccttttcgcctcaaaggagaatgccattgatatcgacctgcgccccaatctgaaaacgcaaatcttgcattaactgagggagctaggatgaagcttcgaaccatattcgaaacctacgattgccgagttaggtttgtcaccataaccggcgtgtttgtggaatctcaaattgtgcggagtttcggtcaagctcaggagattgtatcactcctctgcaatcccgcagatactggtatccgtctatccttcttcgacgaagaggagggctgcgagtcgatcctctgccgattcaactacaaaggagaaatcatcaaatgaataacaagtataaggataacatcattgcggaatactgccatttcgacggcagacggccagtcctttccttggcggcacgatgggtccaccacgacagtcgagttgtgaagctggcagcgctctttgcctgtgctggctatggccgtccttacaaagattgtattaaggcctacaaggacgccaagcagcgggaaaaggatatgcgaaaccctgccaaatggaagctgagccgagcgactaagcgggctctacgggctcgactagtggctatagaaaaactagaataatccggaaaatacctgttgacgtgaggctagagggttccctatactgtgcctatcgagacgcacaaggcgtctcctaagctagaaggactagcaaaatggcaaaggcaaatctgaagttctcccgcattggcaatgacggctacgactacgcccgcagggaagacggggtttggtttgtcagagaagggtactacgggcggtacggctgggctaaaaccaaatggactcaagttcaacccggggatggcatgactatagtcgatgcctgcctgaaggctcacgaagctggaagctccagcacatacatcggattcgggaatctggtggtattttccgacgggaaggggctccgtttaccctgaacaggaactcaaataaagttgttgacagcttaggccattcctgtagaatggccctcaagcaaagggaatcaccctgagcacctgaataggtaaaagacgatgcaagcaacctaccaagccctgaaaactctgcgcgatgcttgtgaagctgtcaaggatgaaaaaggcaccatcaacggaaacaaattgaatgcactgcgtaacaaggctgtcaaggaaatgcaagctggtggtgaaacctactctgacgccattagcatggctcacgacttgattaagaagtatcgcaagtaatcaatccgtaacaagccccgggtgaccggggcctctcataggagagaccatgaaaaacgttcaaatctgttgttcgaagtgtggagccatcaacggcggtaacagcaaacacaattgggttatcgcattaggcaagaagtggtgcggtcattgtgggtccaatctcacaacccttcgtcgctaaccattcactgagacctaatcgaggagagatcatgaacgccactctggcacgcctacagaacgaacgctgtgcaaccctccgcctgatgctgctgccggaacatcgtgggtatcagttctctggccatccttgggccgagcgcatccgcaatctccacgatgaagccaagtgcatccgcagccatcactaaaccgcactaatccattaaaactctaacagcccgccttgtgcgggctttgttctatctgcgaaagcgacagctttcaagtgtaattaacatgtaatgttgtaacactctgtagaggtaacaccagcatgacaagatagaccacttgtaacgttgacgttacatgtataacagcatgacagcgaaagctgtacagatagcattctgtccagttcacccctatcaaataaccccacaataacccacctaaaacctatcggttttaagcggcctgtaaggccgtatatgaagcgatagcttcgctatgttagtctgcaccatcaaggcgagagccttacagcatgaggcttgtaggaggttttaaggccatatgcgattagcataggatgttggttgttttaggtagatttttggtataacccctttcagcgctaccattgtcccggtgatgttaagcgacagcttacatccgctcccattttgcaatggaaattgcatacagttcatcatgcgcttcaaaagtgacttcactttgcatgcggatgcatgctatagtataccctgtgatagctccgctatcccgttttgcatggcacacgaattgcataagcatgacaagggtaaccctcgaaagcggagctttcaaagtgtaggctgagtgtgggctctacctctattatatttgcgaccggaagtagtgacactgaaaacgttgactctagcccagtaaatacgttaaactaaaaggttgatagctgccgctatcgagtaaccaacattcacacaaggaggcacaatgacaagcaacaatcatgccaagattcacatccattacgctaagcaaatctactacgccatgcgtaaacgtgccatcgcaagcgatgagatatgcaaggaatgggccaagcccaagacaggctttgaagcgttctatgattgggtggtgaatgtgtcagggtacgccgtaggctaccgcctagacaggaatatcctcttcccgggaaacaagctctatgctccgcatacatgtgagttcacacctacatacatgcatactctattcaccaactgcgacaagacaagcaataaccgtgccaacaatgatctacctctaggcgtccgcctagcccgtcatgacaagtacggaatgccagtatacgtctcacagtgcaggacactaggcaagcagtctacccttggatcgttcgacgatccgatgcaagcccatgcggcatggcaacatgccaaggtagcagccatcctcgaatgtattgatctctatcagatggaggatgttcacagtgtaaacgttgttcaagcgttgcttgaaagagtggacaaacttggcaaggatattgcacagggaaaagagacaacccttttgcaatgatttgatggggtcgatggtcaaccctctgagagtgcgagaactccgccagagtaatccgatagcgaagctatcaaacgtatatgcatattccatgccaacatgtggaaagatttcacccggcagggcgggagcccgttggcattagttttgcatagcttagctgtcgctaagaaggaaagaccacggccacccattattttggatttactaaggg

SEQ ID NO: 63 - DNA, 94826 bp, synthetic construct
  source 1..94826: mol_type = other DNA
gcttacatccgctcccattttgcaatggaaattgcatacagttcatcatgcgcttcaaaagtgacttcactttgcatgcggatgcatgctatagtataccctgtgatagctccgctatcccgttttgcatggcacacgaattgcataagcatgacaagggtaaccctcgaaagcggagctttcaaagtgtaggctgagtgtgggctctacctctattatatttgcgaccggaagtagtgacactgaaaacgttgactctagcccagtaaatacgttaaactaaaaggttgatagctgccgctatcgagtaaccaacattcacacaaggaggcacaatgacaagcaacaatcatgccaagattcacatccattacgctaagcaaatctactacgccatgcgtaaacgtgccatcgcaagcgatgagatatgcaaggaatgggccaagcccaagacaggctttgaagcgttctatgattgggtggtgaatgtgtcagggtacgccgtaggctaccgcctagacaggaatatcctcttcccgggaaacaagctctatgctccgcatacatgtgagttcacacctacatacatgcatactctattcaccaactgcgacaagacaagcaataaccgtgccaacaatgatctacctctaggcgtccgcctagcccgtcatgacaagtacggaatgccagtatacgtctcacagtgcaggacactaggcaagcagtctacccttggatcgttcgacgatccgatgcaagcccatgcggcatggcaacatgccaaggtagcagccatcctcgaatgtattgatctctatcagatggaggatgttcacagtgtaaacgttgttcaagcgttgcttgaaagagtggacaaacttggcaaggatattgcacagggaaaagagacaacccttttgcaatgatttgatggggtcgatggtcaaccctctgagagtgcgagaactccgccagagtaatccgatagcgaagctatcaaacgtatatgcatattccatgccaacatgtggaaagatttcacccggcagggcgggagcccgttggcattagttttgcatagcttagctgtcgctaagaaggaaagaccacggccacccattattttggatttactaagggttagggtagcgaggtgggttcgtggttaagtagctcggaaataaatccataactggcagaaggcgaaccagcagagggcaggcccgctccctccattattttcccagcagtagaggaggcacactctacaaacgtatcactctattcggcgggggtttaggattcgaatatacctttagcggctaaatgccatcattgcttatttcctattttcgtgctataatccttataggatgttcttattcttcattatagctggataagcgatggttgtatagattcaccacaaatagaaggaatatagaatggaagataatattcaagctccgcttgcagctagtgcaggtggcaaattcgcaactgtatacgaagctattgtcgcactcggagtagaaggggctgccgctgtgtacagggtaggtgtagggaatagattgacaacagctagaccatcggcgtggtaaagagaagccccgggcagcgaaagctgatcccggggctttttattgccttgagtttatgtatgaagagattccagttgtctctgctcttccatatactccctagtggcgtagttcatcatgaggttgcaatactcttcgtttatctggtccatgtattgcaacactttctccatgctctggcatggactaaatccattatgacggagaatcttgcttagattaccctcattccagaagtctctggcccaagcctccaaagctactgcgtagaggcttttgatgcacccgataggggatggataccaatattgctcagacattagaccctccaaacgcagcaaacaccccttgcttagctaggatagtctttagctcctccagtgaaatggtctcgtctcctacgaccacatacttgtctgccttccctagagtcatcacacacttagtctggaaggtaggccgatacaagtcatacacatcgggttgccacttgcttcgcaggccagttccgtagctaatgaaccggtcttcgggatgatcccggatgtataggcaccggggactatcatctggcccatctacggagatagggtgttccatccactccctgatcttatcaacgacgccctctcctaccttcaattgagcgtactgacagtactcaaggaacgcatcaaactgttcggcagtgaaattgctgacatcgatctctttagttttcattctcttcctccatgtctgcaatgatttccttcaacgcttgaagcgtgtaggtgccatttagctctgtagtaggaccagtgtcacactcatgaagcgtgtacgcggtcactttcttctcagtgacgaaatggaagtctacccttcggaagtcgtaggtcgatttcgagtatccaatggcctctttgagttcttcctcgtaccacaggaatgtcattggacttccgtcgcttttacgagtgtagtccagcagattatctccaacccacagtagcacttgagccttgtcgtacatgaagccgtttccgctcccaaactcgataccataagccttaaggtgctgttgtactgcaatgttctcttcgggggtcttcacaatagtgtaaaacttcaccaaacgctctttcaatttcagtcctcctgtctgtgttttatgggagtgtaaaacgttcccagtccattgtcaagccttctgtggtgatagtctgttccagacgctctctagctccttttagaatgatatcccactcatctccttcttggacccctacatacttctccatcatcagcgcacgatcaacaagcccagctctgtagttctgtcgctcttttctacgcgatagcactcttgagatatggtccttcttcttcgccaacacgctgatagctttccttgccataagagttgcatactcgctctcctcggcggtcatccattcctgatacagcagccctagacgagtgtcatgctgtacgagtggaaggtctttccatatgatacctactcgtccagtatcagagacggctttccattccagcgtagtgccgccggtcttatagtcggtgatctttacattctccgagttagattgagactggaaagcgtgcctccagtctcggtatacagtccaccgtttccagtcgaagaatgtctcacagatggctttaacaggttctccgattttaccctccagttctttcaggcggttctcctgctcagcactcatgtatttgataggtcgggaggctggatcgtagcactcctctacctgaaactcctcagcccgagactccaacactttaggctcatcgttactttcttcctctcggaaccatgcgaacagcttcttaaacatattcagtcctcctctcctgtgatagctaccctagtcagtctccacacttttctaggtagactaacgaggaatagcatagccataaacggtacggcgataggccagaatattccagctaacaccgctcgggcctctttcttacgcctctccgtactttctcccctccacccaagaaggggtcgtagagattcccatacgaacatccctatcacagagtagaacaataggcagaccactccgacgactatgcatactagaatgagaagccctacttgttccatggtgcgatcctcttaagtagtttacggctgttccagatagacagagcccacttaggtaacaacaccactttcaaaacgctgtatgttgcgtagagtagcagaaagctagcatacactgtgaatgtaataggccatagcagtcccagtacaatggcaaaagcctcgataccctctctgtgatctttagtcgcactagctgggaagttatctttgaaatactccgtgatacccatgtaggtccacatgaacgcaattccccacgcgagcgcgaggacgaatagcattgggattatctccattactcccctccttttcgaatcaagtcgaagtaggcccacacgtagaagttgcaccacgctctgcctatggcccagccttcccaatagtcttcccagtccttgttcggagggttattctcgaacatggataacacgcatgaatcagctacttcgtccaagaggtgcattaccgaattaagcggcccgattccaaaggtcttatctagccaccccttaaatcgtcccacgtctgagacggtgacgctggagtcactgcacagtgccaatctctccagaatgtagcacatgtaaggctcttcttcgttctcgaagaatgcccgcatgccttccttgattagtggtgcaatactattagagttcattttccctcctttcggatcaggtcgaaataagaccagacataaaagttcatccagttcgtctcagtgtctcttagacaattgcgatgaagataagagataactgattcccacgacgtaatcccgtgctgctctattagccactctctgaatgaccgatactctccgtgggtgatttgcccttcttctactaggtcactcaggatataacacatatatgtgtcccgggcgtttaccgagtaatcttccagtccgatctttatcaactctgcaactgatctcattgtttcctcctctgagagccccactagggctctaaatttttggttcgacctgcgtcagtggtggtggtggtggtgctcgagactcaccggtgcttgtgcggcggcgccctgtggtttatacgcgaggagcgtaccagagccaccggtacgcgggtcgaagatcggaacggtcatgaaacccagctcgtccgcgaaaccgaaacgcgcacgctgatattcgatccagttcaggtcaccacgacccggtttgaacgcacgggtgtcctgaggttcagacgcgtatttcttgatgaggtccgggtttttaaccgccgcaaaaacgaatttacgcgcagagtggatgtcacgaccgttttctttgtaggcgtagaggtcgataccctgacgagaggcggtttccgcaatcatagtcagcggcagcatcgcgtaattctggtagtgcagagactgttcgtgacgggtcatttcgtgaacaaaggaaccgtcttcgttgatcagacccatcgcttgaacgtaacgacccagaccccaacggaacagttcgtcgtctttagagataacaccgatgatcgtggcttcctgaccacgccagtaagagtggttgttgcagcaagaggtatcaccacccgggaaagaggtctggtgacgcgcaacgcggttcagccatttaacaacacgttcacgctgcgcggtgtcaacgttcggttccgccatcatggtagacagcgcgaatgcagcggtcgccgcagaccattcaacctgataccagctctgagatttcggatcgtagttgagcagcgcgtcggctttcgcccatttgtccagcatgttcagcaggcaggtcgcatacactggtttaccggtcgcaacgtacaggttacccagggtcgcagagattttttcgaagtcgcggtacagggtaacaactggttcgtagtccggattaaccggaccgtggttaccagacaggtagcgacgcgggataaccatttcaccctgctgcgggttcggggtcgcttcggtggtgcagtcgtattctttcggcagtgctgctttcagacgatcatccagctgaccgctctgcagaaaggtacgacgtgctttaacatctacatagcttgcggtaggatccttaaccacagcttggtcaaacggatgcataaataaacctccttaccttaaatccttagccgtcagcacatcacaacccagttgtacaggtcggcctcctcataagctgatgggtagcgattgtactccaagaagaacgcgtggtcaatagctgagtatttggttgcgaaactcgtaatgtaagtcagaaacccgttgtcctctttcctgaacagggcgtattcttcagtaccgtccttaaacgtatctagcgagatagtatacttgtcgaagatcacagcatttcctcccggctaatgtagtagttgtagttgtcctcttggacgaggaacgcacgatagaagcctttctcaaagtctcccttgaccagcaccagattgccctccaccttgcatgtatagatatacatggtgtttgctactcggataacaggatcatccccgggacgaacatccagagcagagagcatagcctccattggcatgcttgtcaagtgtgcaactacagccgagcagtattctgcatcgcggccagaagtgtcctctgcataagcaggagcgaccccgcacgaatgcagggcgagtgtaaacgcaatagctacgagtttcttgaacatactaaccctcctcttggtctgtctggggaacatccggctttgggtagacgaatgtctctggatacttcatgcatcttagctcatctttgcagaacccgtcaatcaatttctcatgtgcgaattccgcagccttgtagtagcgattagcctgtcttgcctccactcgaaggaggtggcttatcgtgtgagcgttgatattactaagacttgcaaaaattgtcaagagcttttttgcagaaagaggaatcgacctttcatcgggtctgtaccagtccagccgggcaactccttggagaacgtcgtctacccacaacgggtagtctccgtctagctcgaccatgacttcgtacatttcaggctgaacagcgttgaaaaagaaagagggctttcgccctctgctggtatctagaggaggaacaagccccctctccaccttgtgaatcaaccgatcagcattcgcccctatccgagactttagctcctcgatctcttcacatgtcaacatacggagggcacaccttagatttctcgatagtgaacacgccttcgcatgtcaggttagcaggtccataccacttgaacatgttgttgatatcgtatcgaatcaactggcggaacttctgcccgtcgcacatatccacgtcgaaccacgccacgacccatctgacgtaatcttcagggtcgttctcttctcgccatctgcactctagatcaacgtgactgggctctagaacgtaaatgtcttcgaaccctgtactctggttgttcttaagtcggatgattcgagcgcgaatccattgcatgcacctgcggtttgggtctgtgatatcgcagactaccggaacctctggaacctcaactgtatacatgattgtacctctatttgttttacaagaacgccatgattctgtctctgtctgcatggcggtacagattgaagcaaggcacgcctctagaggacgccagttgccaagcggtcctagtcccgccttctggaatcccgttgtggtctgtcttgctccagcacaccaagaacttgctaggcgtgttgagatcgattcccagcacttggaaaacgttccgagtgtgggctcgtcttgcgaacgggcttagaacggacctcccgtcatttctgacagagttccaagccggatgaatttgactggcaatgcctttagcttcttcccattcagccggcaactcttcctctggcaggatggtagctccgagcgtctccgttatctggtactggttgaagccgggagacggaagatagatttctgccgtagttcctcccttgttattggatatataatccagccagcccgattcgaacgctgagtccgctcccttcgctcctcctgaccgaagaataaaaccttgttctgccagtttacggcctacctctcgaaggatgccccactctctgtttggcgtatccctacttccgactcctgtgtaatacttcataagatcaccatttcggatagctcttctggtgttacccattgatgccggtattctccgttcttcgggttagaatattccaatagaacagggtaatactcgtctcggtaatcggtgtctataacctcgcagttccaacctacagggataggacaagaacgccccttgggggccatcttagttccaatagacaacctgccttgactagccgcctcattgacgcttatcaggctgtatctgtgttttaacgcttcaactaccttgacttggaggtctaaaagttcctcgattgtaaagtggcttacatcgattgtcatattactccctcccttccagtttcttgaattctttgtccagcttagctagatgcttatccaacttgtctagctttttatcctgataaagctggaaagcctccgagcccggggccaaccaagtccccttatacttaattgcaccccggatcatatctcctcctattacagttcgtaaacgtatacctgaaactggccgagcgtctcctcgataagaggctcgacattgctccagtcctctccggctaaaccgcagccaatcttcggcagacctacacacaactccgaggtaggaatcgcccgagcgtcagcctctgcctcaaggaacagagacatagtgtacagggcttggcccagtgcgtcaagctgagtgtagactcgtccctcttctcggccatagttgtactgcccgtacagattgtaaatcgatccatactcgttaattgtgaaggtgagggagccgagtttgcctcgatcccctttcaccgttgcttggtctgcctcgtaggcctccgggaattgctcccggatttgcttagcaatgccgctgcccatggtgttgaagcaattagcctgatgtgcaatagcgtgcaactctttgtttttgaacgcggcgagcaggtcgccctttcggtatttaatcatttgaacctctctacacttgtgaatctgacttcagagcctctcgctccgtgagcaatgtccgcgtacattgagttaatggcagcaaacggggaccaatactccttctcccagattttgaacttgaacattttgtgccctttattttctgggcgaccttgttcgcagaaggttgtaaagtaatatttagctaacacctttatcctccttatactccgttcttaatccgataacggatagatgccaagtcattgttcttcaggtcttcggtgtcccatttcccgtctttgaagaacgtccgcaaggaaccagtagcctcctcctcttcagatacattatctttcaactggaggaatcgcccattttgcaggtctcggtacactttcaggaggcctttagccgacttcttcttgctgtcagttttcgggtctttgaagattgcaatgccttcaccgttcacttccgtgtaggtagctttcactgcgaatccgaaagtatcccgggtgttgcactggtaagtgtaactgccaactccaaacactacgttcagggaagcgaaacctttctccttcaagcgctccaagattttagctgctcggcgagttgtaatggaatctccatagatcaaaccgatatgagaatcgagcatcttatagcctgcttcgttcacagtaccgccgaaggtttcccacagaacttggatagctcctttcacctgcgcctcgctcacttcttcaagtttatagccaattacatactcgtattgatcccactcagtgggaataaccttgaagtacttatcttcaaagttcagaacaaatgcatcgtttccatttactgcatccatgatatcccagtgttcgagcgactcgacaacttcaatatcacccagtccgcagataacctctacaggatcaccagagtctggacgaacaaccagcttgccgtcacgttccatgatctgatccttgatggacggcagaatgtcagtaagcacgccccagaagtcgaagctgtctgccacgtaagacagaataccactcgggaacttacccatcagttcaacaaggaatcgacgttctgcttcctcacggccacctttaccttctccatccttcatttctttctcaatgcggaggatgttactagtagctacagcgtgttcagtcgcaggaacggagcaagctaccaaaccagtcgcgttatagtagtcctcagcataaatagctgctgccaatgtgtccgaacctacgaacgaggtcaagtgaccaacaccactacgggctgcgtcttcgatcccgctcataccccgggcactgaagtcgtggaactgaacggacagcaggaagtcgtcatagcatccagtgtgattcgcgtagtatcggcccatagctgcgtattctgcggcgatagtggcgttagtcgcggtcttccaagtcatagcagaaatcagtgtttcgtggtagttcactagccagtagaactccggcagggtgttcttgatggtgagaacaggcacgcccatcggtacactgacgccttcagtcagagacttgacctccagaggcagatagccgagcttgtgtagggctcgaagctgctccacagcctccatttcccggccaaaatagccagtcaggaaccgggcataccggccaacggcgttctcttcttcagccgcgaagaagccttcccaagactctacgatctccatccaagcggcccgtccgccgacccacttgagagtgccgtcgtagaagtcggtggcatgcgtctttcgataaatcttatcggagcgaggggtcaggttgctatagacaagctgagtcccttccgagtacatggaaccgtgtccaatcttataaccatcggtggaaagatgtggcagaattttcatgttatttcctcctgttgtgttgaataggcccagactacatcaatctgggcctcctgtcaatattcgacttcttctactggcagcgtcagcacagggtagatgcatggaaggcgcagcaatggttgcttcttgctgtggaagtcttcccaaaacttatcgtgcatcgtcttgtaccgagcgtccagttcctccttggtgtcgaactcctccaccttgacaaccctcttctctggagccgaacgcttatactctacaatccagatactcaagctcacaggcgttccgccttggagtattcaaccggaatgacagtcagcgcttcgtgctctttttgagggagcgtatccgaggtgtagatgcatccgaaggaatccagcaagcagtcgatacccttactgaagattccatgagtgacgaacaggtcagggagcactttactgtactctcttagggccttagacacgcttcggaatgtagcacctccgtcacagatatcgtcgatcaccagaagcggaagttcaggatcgatatccgaaggattcagaatttcaaagccttcgattttaccggtctggagatcgcgcttcttattgcaacgaattacagcggctgctccggccttctttgcaaaatcctcggtccgctttgttgctccgatatcaggggctacgagttgatattgctcccactctgaacggctcagtaggccaccgaagaccgaagattgacggacaacttcgacgttgttaatcaggtgcagagttgcgtcgctgtgagggtccacaacgataactcggtcatatccggcagagttcagcatgtttgcaaacactttcaaactgaaggcgtcgcccggattgcaccgacggtcttggcgagcatacgggacataacccagcagaagagtcatgtgcggattaatcatttctgctcggatcgcctcggtgacgttgagaagagccatgatatcatcactattctgaatctgagctttaacgtttacgaacgcatggctttcgatgccgcccacattaacgcccacttcgccgcccgggaacgtccacacttttgcctcttgccacggacggctcataacaccttccatttcctgaaggcaacctacagcataactaatcatacatcctcctcacagtttcacagagaagcgattccgcattgcttccatcgtgctctcgggaacatcgtgtacagacttattcccatgacgattctctacaatcagagagataacagtgtagccaaactcttcagccatgtcaatgtatggtgctacctctcgctcccgggtactagtattggatacgataaccgcatctagtcctatctccatagaccgtcgcgctttgtccatgcactttttgtgagattcaactaccctctcagctttccacacatacttgccgaactccatttggtaatcgtccgcttcgcagatagacgcctgccggcctgactcccaagttttgttatacagaatctcggcaagagaggacttcccggagcccgggagtcctcgaatgatatacatgatcttttcttgcatacttcctcctttaaattcgagccatatcgaagtaggtttcgatcagaagtcgtcgctgtgcatcggtcatttctgagaaccgagcctcatccacttcatttaccaagaagtctaccagaggatagaactcttcgtcaagcgtctgcttgaatccagccgggtcttggtacatcgcattgaccttcttactacccatcctcatgataaacttcttgccgaggtagtgagttgacttgcacttcactgtccctagccctgtttgtaccatgtaaccttctttctcacaagaactcagaagaccctttgcatgttcccagctacactctatgtgctctggacgaagaatctttacagaactgtggtccgttacacctagggcgtgagagtcaagaatatattctgaaagctggcccccagtgaagatatcgcggataccgatcaaatatgccccttcttcttcctcgacaatgtgagggtcgtctggagagcatatctcgaagttatatgtgaagcctgcgatgtaatcatctgggttattcgacacatacttctgaccaagggcaacgtaatcgccggtcaatgaccccgtagtactgaagataagggagccattgtgcttagtcacggagaacatgaatccattcactttctcaatcagccgcacacggaatttaggatggaggaaactcccagcaccattctctcccagattaaacaccttctcgaaggggcgtacaatacaatcaccggagtgctggtcaaatacatgaccccgtgcctccagaagaagcgggtgcttgttccacaagttgtcgtagaataccttacgagcgtatttaataaccgacataccgttgaagtgcttaacagtcaccagcttattagcgatcaggtctttgtacatctcaatatggagtttaccttccatcctattcctccttattctacttctacaatcgggcagaatttagacttcttcgctttcaaatacgacaagaaaatcccatcctttttatcgggcctcttagacatcagtcgagcgagccgatagaagaccgatacaccatagaatacagccgctacggcaatccatataaaccccataatagccaaagtcccgcctagaatgtagccggtcgcgggtccaagtagcagtgcatacaggctggagcctataaccgatgcaaatgcgactgaactgagggctagccacactacaagaaagaccgtttgccagaaataagagcagagagtaacgctcttccatccgctggaaatgtccaagtaggtaggactttcgaatttacgatgcaggcgcatatgccacgaattcttattaatcttcatgcttgttcctccgggaagatgttgaaattgagtacgttgtgctcttcgagttcgaaagaagctaccatcttgtagcctccgagcttgtcaacgatctccagtatactctcgatagagaatttgtcaacatgctgcttcatcagattagagattcgactctgatgagtaccacatctctcagctacttcccgctgagtgaggcccgactgagaaatatagtgtgcagccactgccattacagcctttttgaaatcttgaactgggttgctcatgttaatcctccttattactcagtgtaatttttccgctaaagactcgaaactggctgatctcgaactggtcagtccagcgagcgtcttcgaaagccactccttcgaaagttccatcaaacttgacgtctgaagtcatcagtacaatgaaaggcacgccttcatcgtggatcagctctacaagagtattagccttgggtgtaataccgttttcttcacgtgaaatcaacacattaaccatattatcctctctgtccgtcatggtgatctactaccacaaattcttgattccgcatgtattctctcacttcatcgtaagagaatacctgatgatctgggtgattgtcaatacctacatcaagcctctttcctttggaaggcaagctgccgtgagtgtggccgtgtagatgccaagcaccatgatgagcagtattccacgtctcgaaagggtagtggcacatcacgatcttcactccgtcaattcgaatctccttgtactcacgaatgtcttctacgtgagagagattgctatcagcgatcaacttccacagacgagagtcgcaatggtttcccttcaggaaggtgatacggccattcaactgcttgatgatatccagcacaggctggagcttgttctttcctgcaaatgcgaagtctcccagatggtacacttcgtctacccgacctacccgggagttccaccgagaaataagctcctcagtttgctcctcgaaagtccaaggcctgttgcagtattcgatcacattcttatggaagaagtggagatcggaagagaaaaatacagacattatgcctccttttcaaattcataaatcttgttgatcctgcggatcagtcgaatagcagcccctcccagcagatgctctcgatccggtttcatatgggccattgccttgaactctgacagcatatctcggcgttcatagtggaagtctactacccagtaggtgtctgcattaatcttaccctctcggtacaggtgcccttcaacaccaagccagtggtctactgcgtctttcttcagtaactctttcggagaccacttgtctacaccccgcaacttctcgaagaaagagtaaggacgagaatagttgttgatggcttcctctacagccgactcagcctgcaatttaatgaactcccatcttgcaagaacttctttaatctcctcggtggtggctggggtgtagctgtactgctctttatattcattccacattatactgttctcctacgtagcctttgaatttgtcggaacgggttgtcttcttctgtgccttgttttccagaaccgatgcttccctttcgagcatgctcagttggttgctatacttcttgatccgtttcgcattgccactcatcacagaatttgtaagattggcaatagtgtcgcagattttaacctcttttgcaaccggatgattacggcaaccctcgatatacttccgatagctttcagctcggtttttgtcaagaatgaccagagcctctacgatatgcggcatcacgcccatagactctaagtcctcctctgtcaggtcggtatcctcaagaacgtcatggaggaagcagaccgctagaagggtgtccatgtacggaaagtccgagaaggcctgattcgggtccatatccttcggagcattacgtgctacgcagattgtatgcacttggttcagatggtaggcatacggatagttggtctctccataccgctgaccttcatgggccgagagtgcgatctcgatagcaataccgagctgagttttcatgttaatctcctttgtagaatgtgtggttgcctatcttgatggtacgcttgtacttccgagcccaccgagggagcctgccattattggctctccttacctttctctcgttcaggtagtggtccgctcctcccgttggatcaacagtatacccatacagagcgttgtatgcaacatgttttgctgtctcccacttgtcgggctccttgacgccctgccgcatgctaccatcgcaggtgtacgaatattgacatttgaagtataacactccagctacggtgctgggccacctgtcgtgctgcatcctgttgatgacggtatgagctacagcaatctgcccgatttccggctctccacgggcttcgaagtagaccgcttctgccagcagtctgcaaggctttctgtactcgcacagtgttcgcttgctttctatgatttgagcgggactggcttggaactccactacaggctccgtgccgtattttagacgagagtattccatgtcgaggaacatcccaatgaaggctagaaggatcgacaaaacgagagcttctaaggtttccataacacctccttagacaaagaagcccgccttgtgggcgggctgtatatcactcggctattatacttcagcccaagttgtaacgacgggcgtagtctttgttggggaactcgaccatcatcgactgaatgtgaatgttgcctttacgatccttctggattttggcatttttcacaatcttacaggcctgcgccttagccataagctcagggcttacaaccagatcgatgaaccctgcactccgatacccgcatccggcaggggcccagaagccgtgctgggtcatcgtcgagccgggaacgaggtacaggttgtgcagacgcacagcagtgttgaaactcagcttgctgatatgcttcgcttcccgagtttgggtttcaaaacacccagtcgtgtagttgaatttgtaagtgagagcatccatgaactgaatgacgcttcgaatctggatagcagaagtatccaagagctggaactcctcagccgcgtcgattgcagtggtcacgttgacagacttagcgttgaacattttatatcctccttattcttcagggacaaatacaccgccgattacccagccagcgcgaattagtttaccagttgggaactgagcacgcaaggtctttttgaaacgactttgaatttgcacagttagccacttaccccggtagttctcaaaattagtgatctgatccttgcgttcgtcaaagtcaccgtacgtcacttcaagcagctcttgaggtacagggtcaaacaccaccagaacagcgttcccattcttgtctaccacgtagttcacgatctgcatttccatatcgaagaactctttgtacttctggagaccgctggagcgcttaccagattcgtacaagccctctgggctgcgccacatgataccctcataaccgttctgacggtacacgtcgtgaagacgtttgaggtcttcgaaagtggagcagaatacgtactcaacgaatcgaatactccccagatcactgtgtagtgcagactggaactggaagtctaccagacgctccttgaatgtcaagccttctttcacgatatcgaatacgtgaaattccagtcgctgccgcagtccgtaaataaacgatgtgctatctacttccttaaggagccgatcatactcctcctctccgtcttcaataggataggcgtccagagctttctcggccttcatccacttgtcgtaagcatcctcccgcttaaccgcagagttgatatcttccagcacctccccatggacgtacagttcgccgtcccacacatcaccctcttgcatgatctcttcgagttctttgatgatgtgcggtacattgtaaggtttacccatgcgagacgctagcgtaactacgccattggctttcttagccatgcaacgcaggccgtctagtttaggagagccatacccctctttgtatttagcgggatcaagcggttttgcgagcatagccataacagggagatcgttgagttcttccttggttgcacgataacccttgtccaactgcttgctcaccttggactgagcctcagacacggcctgctcctctacagagcgtttctgcttaccaactcggatgttggtaacctgagaggtcatggctccatgttctttgccgtatttcacgacgatattgaagctaccgtcttcctctccgaccacctctacagtccactccttgaacccgcctttcttgtcgagtccatacagtcgttgaaaataactcattgatcctcctcgtatttgatgacaagaacatcattctcccgtaggtgcctaagaccttcgtcgagccgatattcgtgcttatagtacactactttgatcccagcttcaaccaccgagatagcacaatttttacagcaagagtgagtgacgaacagggtagccccttgggcactctcagggctgcgtataagggccctcagtgcgttttcttcggcatgcctcacctctgccttggttactcccgtttcgtcctccagcggcccgtttaagtgctctggaagggcattatacccgcaactgatgatacggttacgttttactagaactgcaccaaccttggaacgagtcgagtcgctgcacttagcgaaggcctcagcggcctccatgtaagctttaatatgcttaaccttcacacctagcctccgccgacgaggacagcaatctcctcgtactcttcagtggatgcgaactccatgtaatagtcgtccgtatctgacaggtaaacaacgataggcggataataactccatacagggtctccgtgttcgatttcagctaccctcacattgccatacactgtgcgaagagtctgtagagcttcgatcacatcgtcaatacgcattacagttggttcagtcatacctgcctcctcagttttctactttacaaacggcatcgccgcgtcgaaggaacacttgcactgacggctttccgctccacttgtcccacgcttcagctttaacactgacagtcttaggattgatggcaaccacctcgcctaccagcataaccattccagttccgcctaggcagaatgctactgcgtcgccgatctcgatatcccttcctgctacgtccttcatttgtactctccatctacacccttgattaaaataacgaagtccgaggggtcatcactgccgtaggcctttgcccgaaactcctgctcgtatttattcaccgcctccggatcacttttaacctcaagctcttggtagaggtcttccataaaccaacccaagtccgtggtcgcagccgaagccgagaggtgaccaagaagtcctaccagcatattgatctcgtcgctctccaactccaacttgtgaccgttacgttttactactttcatatttcctcctatcgcttctgtccgcgacgagtggctacgccgtaagctggcttgctcccctcgcccgtgttgtgtttcttctgcactcggctggcattgacggtgtaacgccctttgccatactcttcatctatccacgcttgggccttagctcgctgagacgtgtggacaaagatgtagtagccagatgcatccttgataaaccaagtggccgggggctggaagtccagacgtgaaaactcttcatagtcgatcacagtcaccttctgcttagccactgtatactgccccactaccgactcttttgcaatgattttatcaatcatctgagttgaaagatcagagttcttcgaggtcaatttctacctcctttcctagtccagtatctgcaaagaagctatcgagactcagagcgtggtattgagacactttgtaaccaccactcttcagaaggctgtgagcggcctcctctactttgtcctctgtcagtctccagtccgcacctaggagtacttcagctaactgctctacactcggagggttcccaatccacagacccattctactgtcaggctcgtaatcttcttcccatacaagttcccacactaggttactcattggtacacctccttcttacgaatagaatacataacccactcgtcttttcctgtcttcccgcacggaatgtctacttcacactctgcgtttacaatcaggcccgctacgatgaaatcaagaagctcctcgtctggctctggtaagcccgggtaggacgatacaaccctgcggatagtctccgatttggtattgcccagtaccccaagcatgtggaggtcaaactctccactgtagtcgtcccagagttgtccaaatatcacccatacactattcatacctagtaatcctcctttagcttgttggtgtccattaggcagcctccttcttcttgtccagcaacttcaggcatcgtttgcaggtgatatgattgcggtagcgggagaagttcttctcctcgaagtcgccatcggtgccacagaagacgtcatatggttcttcactgtccgcttctgtgccgccgtcccactcgtcgtagtgaactgctcgcgtcgccattcacttcacctcgattccggcttgctggagggcttcgacgcactcatctcgataagcttgaaggtcttcgtcgaatatgactctcggcaggtccaccctcagagccgcgcggctggctttccatgcctgccacatcagcgagtagcggtgtgctgcttctataagagccacgtatacgtggacgttatcggtcttcacaggaaagtagtcggtgttacgccactcgacaccgccgggaatcgggaaacagttttcgaactcctctctcatactccgcaatcctcctgaatttctttaagaagctcagagggcataaccgacagagccagttcctccagagcatggatgtaatcctcgacatatttccattcctttctgatcttctgaaggtacacgccttctttgctgttgtcgatagcctgaccttccagctcctgcatcagttcgaacattttgtatatcctcctatggccgcaaaaatggccggcgactactgtcccggcctgatgatactactctgaaatttcttccattgcaagtcgtttcttttcaaagaaatcgctgagcttgtcttctagctcttcgccaccgatgtaaagctcttcccctgcctttacacgctctagctccttctcagtcaagaagtcactgtagacgtgatctacccatttatcgcaccacgctgagctaaacgctgcattcctcaggctattcctgaaatcagcagatacaacgccaaaagaaggcgcgtggatcatgaaatatgtgaactggtcgatctcaacggagtcgcaggctagcgcgatggcagtcatggcagacgcacactcaccttcgagacgagcatgcactggagcttgacactccttgatcgctcggattatagcgttggcggtctctacctgtccaccgcatccgttaatggtgatgtacacttcatcattctgacctgcattttcaagggtccaaagctcctctgtgagttcttcgaggctctttattacgtatggcagaaggatggagtaacgattgctaacactttgtgtacatgaaacaggcataatacctcctttacaaaaatgggcccgaaagggcccttattactgaatcactcctcgctttctttctggccagagcccagcattgcaaagaatggaaggaggattgtgctcagctctccgctgacagcttcaccaacttctgcaccagcctgagctacactcaggaactcttcagtgcgtacaaacttgtcaaccttaacgagggttttaaagtctactcgttccaagaacgcagcgccggctgcttccgccagaggttcgaggtttacgacttccatagcgcgatccagagcttcctgattgatctctaggccgttctgtgcggcaacctgcatcagggtagacttcacagtctggattgcgtagtctttgaaaaactcacgttgtgctttgttaaacttcattcacttttctcctttgtagtacgacgacggcgggtttttggtttatcttccgattcagtctcttggacttcctctacaggaacttccttagctacttctgtagccttttcctcagtctgcttctctgcaccttctcggaccatcttgacagacttgagagcgaaattcatgttagcgaagtgcgggtcttccacatcaattcggaagccttggtcaaaggcgttctgcatgcccatcagaagactgaaaacgtcccattcttgcacaatgacttcattgccgtcaagctctttttcgatttcctcagaaacgccttcctgacggaacatctggacttgacagagggtgccatacacaggatagccttcgatggagcggacgactcggaaaccttccttcatgtgggcgtgaatcgagcgaagccagacgatagggttgtattctacgatattgataacttgcatattctttttactccttgcgggttagtgttttacaataataccacgtttctcaggaatgtcaacccattttgttctggtagaggcttgacatagaggaaatctgtggtattatcaatattcagcgtgggagagatatgtctgaaagcactcaccggcccacgcctagcgcctatgaagaggaatccacaagggcaacctgaactcgaatgctgttaaagggtggagacgacgcgaaagcggaatgacagcaatccgatgcagcctacatgctgcccctcaccgaactcatctgcatgagtaagaggaattggatagagccaaggcacgtcttaggcagattaaattctgtatggcgagccttgggacgactctatccttccctagccgaatctatctgcatggggtgttctcctgatacacatacacaaatacccaccacagataatccatcaatcaacccataaggaatttctatgagatgtaagtgctgtgatagcgaactctcgtttgagactccagtcatcaataaacatactggtaaggaggacgatctctgctcctcttgccgtaggtttgctctcaatcctacactggatcatgagtattttggtggttggtatccaagcgaaggggttaccgctcctctccctaccggggactgacattgtatatagagtgcgcgtactctgacaatatgtataaatagtagattacggtgcgaataattctttaagggcttgacaacaggagatttcgtgctataatcggagtatatggggcttacaaagcttcagaggatttaatatgactcaagaaagaaacaagggcggtcgccctacgaatgccgagctagaagcccggggtatcattcagacagacctgaaagcagggcttagacttctaaagaagagctttgcagagaacatcagattcctccaagagcaatctgacaacccagaggtctctctacagatgagaatcaagctcaagaaagagctttctgacatgttcgtcgcttactacaaagctgacattgcactcaaaaaagagcttgcaaaaggaacagaatcaggagataatgagaactctgaagaggacaagactcccggagtcgttctcgcgttttgattaattgccgcttcgttcaatggtaggacgccagactttgaatctggagatgatggttcgatcccatcagcggctgccaaatgtagtaaaagaacattcacccgacaaggaatgtgtctcgctcagaggacagcgagtaataagtgtcctccagaattaagggtcggtgagcgtaattggcaacctactggattccaaatcctcgtattctctgttcgaatcggagtcggcccgccaaattagtgttgacaggagcaaagacctcttgtatagttacaccaactgctcgtatagtgtaatggacagcacaacggtcttctaagccgtaaggtctaggttcgaatcctagtatgagcgccaaattagatggacggaagctaaaggtgccacctgggtccttttcatcacgtgctataaaaataattataatttaaattttttaatataaatatataaattaaaaatagaaagtaaaaaaagaaattaaagaaaaaatagtttttgttttccgaagatgtaaaagactctagggggatcgccaacaaatactaccttttatcttgctcttcctgctctcaggtattaatgccgaattgtttcatcttgtctgtgtagaagaccacacacgaaaatcctgtgattttacattttacttatcgttaatcgaatgtatatctatttaatctgcttttcttgtctaataaatatatatgtaaagtacgctttttgttgaaattttttaaacctttgtttatttttttttcttcattccgtaactcttctaccttctttatttactttctaaaatccaaatacaaaacataaaaataaataaacacagagtaaattcccaaattattccatcattaaaagatacgaggcgcgtgtaagttacaggcaagcgatccgtcctaagaaaccaccactgctcactgccaaaataagtgattttaagtgttgacaaactgaatttttcatgttttaatacacttatcagatgaagaaacaattagcgagtagccctgagtaggtcgggaactagtctagaaaactaggccactgcgatgagcggtgagggttcaactcctttactcgctgccaaattaaggccctgtggtggaattggtatacacatcagtcttagaaactgacgccgagaggattgagggttcaagtccctccggggccaccaaattaagaatctcttttgctatttggttagggttcgagtccctacccggcgactatggccggtctatggcggccaaatagtgagagagctaggggacatgacgaaggtagcgctgctttccgatctccccggcgctataaaagttatcatgaaggggttgacaaacaagaaattcatgataatataggtacatagagtaacaaacaatgtagccgggtagctcaattggtagagcacccgaccgataatcgggtggttgaaggttcaagtccttctctggctaccagaatttaaaggcccattagctcagtctggactagagcaagcccctgtctagggcaaggtcgtcggttcgaatccgacatgggtcgccaacaaggtcgttgtagagatagatggctactatcatccggctgtaacccggacgccataggctagaggttcaattccttccttcgaccaccaaatagcgagagcgttaagactggctggcgctgtcactcggctcataaccgaacacaagtggttcgattccacctctcgctaccaaattgcactccgaggaaccctaagtggtgggttcagtgtcgctacctatctcggtaaggggaagcgcctaagctggcacgggtaattgagtagctgtgataagctactggcagccagtataaatcgtccggctcgggcccgttatagctcctagatttgaattagatgctgtaagccataggaggtgatccagtatctcccggaggggcccgggttaacaacctcatgaatttagcccgcgttggccgagaggtttaggcggcggattgcaaatccgtctcacatcggttcaaatccgatacgcggctccaaagtttattgggatgtagctcagtggtagagcagggagctgttaactctcaggtcgcaggttcgagccctgccgtcccagccaatttccaaaagagactcttcgctttagaagcagagtcgaacgcccgatacgggccttattatctcctcgtagctcagtctggttagagtgtcggatttggaatccgaaggtcgaaggttcaaatccttccggggtgaccaatttaaagcgggtttcgtatagtctggttattattcttggcttccacccaagagactagggttcgaatccctaagcccgcaccaaaagtcgtagacctcagtaacccggagtaacgcccgggagaagatgtgagttctacgtatacgcgtctgaagctaactaggtagaagcaccgggttgaaattccggaggacttggatcgttaccaagcgggcgcaccaaacaatgcagttatagattaaatggataaatcgccagactttcaatctggtgttccgggttcgatccccggtaactgctccaatcaagtccaagccggaacattcctccgtatgtgctttcagccggcttggcattatcagtgtggagattgtgcagcccggatgctgccttccggttgtgacccggttgttggggttcgagtccccgcctccaaccaatgttgtggaattgaatcacaggacgacgactgggtgagattgagcgtcctctagcccgaaagggtgttcgcgcaaggcgaaccgaagccgaaaggctgaagtggtgcccggacccacaaccaatgttgtgtaatggaactattacgttgacgctgtgtgctctccggatcgtaagccggtaaagcgggaatagcgggctcccgtagcagagtagtagtgtggttcgattccacagcacgacacctttcctcctcgcctgtgctgaacggtttcctcctcctttcccgtctcacaggctctattccctgccctttaagcatttatggtgatgcaccggctttgtaacccggcgaattctgttcaagtcaggaatggggcaccaattcactatcaaagaacccgcaagctcccgatagggttcacactctataaggttgtagcatggaaaacactaaggttcctgataaaaaactcggaccaatcgcgctagcgcttaaagaggccagagagaatttcgatctcagccctcatgttattggtccaaaatctttcaaacagaaggagttcacagacagcgatgcaaagatcactgtattcggtggtgctgctggtgctggtaagtcttatctcggtgtaatggacttcatgaaatatatccatgatcctaacttccgaggtgtaatgactcgtcgtactactcctcagattaaaggcccgggcggtctgcttgaaaaagcaacagacctattcaagctcgttgaccctaaagtcaagtggaaagacaaagacggcaagtttgtgttctcttctggtgcagttattttccttcgacacttcgaacaagaatctgacaaagactccttccaaggttgggaggttagtaagttcctagtcgacgaaggtcagcagttcacagaaggcatggtgacataccttatctctcgtatgcgtaacccgaaatgctcggttgttccgcacatgaagattacatgtaaccctgattacaattcgttccttcgtaaatggattgaatggtggctagaccctgacacaggaatcccgatccctgagcgctccggcgtaactcgctggtttgtacgcaaaggcggtaagatgttctggggagacaccaaggaagagtgcattgcccttcatggtaatcccagtctagcgcctgacgatgaagatcaggtgaagcctatcagcttcaaattcatcgcggctaactgtttcgataacccaatcttgatgctcaacgaccctgagtatgtagctaaccttgaagcccttcctagggtagaacgtgaaaagctcctagacggtagctggcacgctagagaagagggagctggatacttcacaagggactggtgccaaatcgttccccatccgcctctacgggtgcttaaaagggtacgtgcatgggacatcagcggtagcattgaatccgaaaccaacagaaaccccgactggacagccggcgtgctgatgagccgtacaaaagaaggcttgttcactgtcgaggatgttgtcagagagcgtaggttgttcggaggtgttttcgacctcattctagaaacagccaagcaagacggtcaagacgttgaaattcaaatcccatgtgacccgggggctgctggtaaagcttatgctgcacagctaattagagacctagcggatcatggattccacgccagaccgaagacaactaacaaatcgaaagttactcgattcgccccgttcgtatctgtagctgaaactaaatcagtgcaagtcgttgcgggagattggaacgaagattacttcgatgaacttgagcgattcgacggaagtaaggctatcaaagatgaccaagttgacgctacatcagatgcatttaatgctctatcccttggcagcttgattatccctgatttcctaccgcctgatatgactcaatccaacaaattcaaactaaattaataggaggcggcgatggccgagactgaaaagacagcaccgggtatcccgcgacttcgcctaggcgagattggtagtacaggccttaaacaagtcaatggtactattctggaagaacgccgaccagaacttcggttccctagggcatgcagaacattccaaatgatggcggaagaccctaccatcaaatcagcactcgatctcttcgaaatgatgatgagcagggttgactgggaagttgatctaggagttgaccccgacgaggctatgaaggcccggggtaaattcctgaaagagtgcatgcatgacatggaacacagttggtactccttcatcaaagaggtcactagcttctacacctacggattctccgtacatgaaatggtgtttaagcgacgtgaaggataccctgtatcgaagtacaatgacaacaaattcggtattaaaaagttgccaatccgctctcagtctactatcaccaaatggttgtactctgaagacggtagaaacttcctagggtgtgagcaaagtcttgccaatgttgtcaatggcgaccgttacgtcaacctaggtaataaggacggaactgtagagattccagctaagaagatgcttcttttccgggtcgatgctaaacgtgacagtcctgaaggtaacagccctctccgtgcgtgctataacgcttggagatatcgagtagagattgaagagcaagagtccgttggcgtaacacgcgatatgaacggtatgcctacgctctatctgcctcctcgatatatgtccgaagatgctacagaagctgagagggcagtctacgaatactacaagcgagtaattcgtaacattcaaatgaatgaacaatctggacttatccttcctcaagcgtttgacccagaaagccgacaacctctgttcaaattcgaactgacctcttcgcagggcagtaagatgtatgatacagatgccatcattcgtcgctgggacaacaaaattctgcaagccttgtttgccgatatgctgaagatgggtcaggaccaagttggctcttactctctagctggtgccaagactaacatcatggctatggcgattgaatcgcggctccgcgaaatcaaagacgtactagataataaactcattcctacgctgttcgcactgaacggtgattatagtccagacttgccgaagctgcaatacggcgagctagatgaaatcgatcttgaagagttctcgaaagggattcagagaatcggttctgtcggtggtcttgaacgtgaccgtgaggtttacaacaagattcgcaaagctctcaagattaagcctcgaccagacgacgagcctgttgatgtggataatatcatgggtggtcagtctcaagcaggtaaagctggagtaggtaatggtgcatcaacatccgcagccggtagagacaacgccgctgcaaataacgcataaggagacagaatgctgactcttgaaagtgttattgaagctctcagcaatgctttcggggctcccgccaaggcggaagaagccccggctgtagaggtcacaaagtccctagacaatgaaaagaggatggctttgtttgtcgttcttgagccccaagaaggcgactccacgactgacctacacgcagacacctactccgaagaggaagtagagaaagcttgcatcaacttcaatactcattgcaacgtagctaatatcttccacaagattgaaacacaggaagctgagattgtccagtccttcatcgctccatccgcattcacaactgacgacggaagagagatcaagaaaggtacatggctccagtggtggcacttccctgaaggctctgaagtagccgatgcactatgggaaggcgttaaatctggtgaattcacaggcgtctctatcggtgccagagctacagtcgaggatatcgaatgaccgtaaaagcaaaacgtaaactgaccgatatcaagtttgaacacgaaggtgctcatgtcgctctggtcagtaagctccaaggtggtgcagccaacgggcacactactctaatcacaaaagctaccaatggcgtaactgaagagcttatcgataaagctgctgaagttacagtcacaatgcagttccctgagttccttcgtaagttcttcgggatgtattatgaagatgccgaagttctctctgttgccatgggatatggcagaacggagtatccagaactagatcacaaagactggatcgaccagcgggtcgagtctatgtccattcttaagtcggtttataaatcggctgacctgaatcaagctctctccgagcttacccctgagcagaccctttcccttaaacaggatcaggaactgcttgaaaaggctctggaggtagtctccgagcaatccaatgaaaatccatccaaggagattaccaacatggaaactatcctgaaatcggcccacctagaagctctagctgacgctattgcagttgaaaaagctgctggtgtcgctgctgttgcagaagttcagaagcaactagacgccgctaatgtagagcttacagctcttcgtgaaattgtcaaggctgctgaggcagagaaaaccgctgctatcgctaaagcccgtaaagagcaactggctgaagtcctcccggctgaccaagtagaagatactttcaagtctctggaagttctggacgatcaagcttttgcacaaacagtaggaacgctccgcattcttaaagctgctgctgaccaaaatgacatgcttgtcgagaaaggtgtatcgggcgctggggaagaagacgactctgttgtcgccggtgttgccgctatcctgaaagctcgccacggctccaagtaatatctagccaatctagaggaattccaaatggctcaaaacattatcgcaaaagatcatcagcgtcttagcaactggctgaaagaagaacaaatgggccaccgtggcctgttctacactcgcgaaactctgcctgtcgctgacattgatgttaaaacaactggttctgtcctagacagcactggcaagctggtaactaaggctactatcgccgacgctacctacatcctaattaccgacctgcacgactatgccaacgctcagatgagccacgctgtcgtccttgctcgcggttttgccaagatcggctccaaggctgttatcttcggtgctgacgttgacgacgctgataaagctaccgtctttgaagctttcaaagccaagaacatcttcgccgttgaccagatcgaaggcgcattcgagaacgtcaccttcgcgtaagcgagggtcgttccagtaaataaacactaggagtaactttaaaatggctaacacccgttcctacctaaacgatggtcagttctacattgccgaccagactgaaaacctgcttatcatcccgaacacttggaccctcgtcgagaacatgggcgtcttcacaagtgaaggtgtgactcagaacactgtccagttcgaagagatcgaaactcgctacggtctggttaaggatgccatccgtggaactcgtcaccaagttgctagcgaccaacgtcgtcaactgcgtgccttcgcgattccgcacttcaaccaagacgactacatcactccagaagacattcaaggcaagcgcgctttcggtgctgaccgcgaagaaactctgaacgaggttcgtgctcgtaagctggaaaccatccgtcgcaactgggctaacaccgctgaagttgcttccgttagcgctatcgtaacaggtaagagctacgccccagccggaaccatcgagtacgactggtacgacctgatgggtaaaactcgtaaggttgtcggcttcgacctgaccaaccctaccgctgacgttatgggcaagaccgaagaaatcttcgtccatatgcaagacaacagccaagacggtctgatccgtggtgacttcgttgccctgtgctctcctgagttcttcactgccctgattaaccatccgagcatcaaagagttctacaaagcttaccaagctagtcctcaatactggcgtgaacgtctaaccgctcgcggtctggaccttcgcttccgtgagttctacttcggaaacattcacttcatcgaataccgtggcgttgacccgtacggcaaccgtctgatcccggctggcgatgcttacttcatcccaaccgacagcggtgacctgttcgctcgttacttcggcccgggcagcactttcgatgacctaggaactctgggtaaagaactgtacgctaccgagcgtatggctgaagaccgtcgttcgatcctgatcgaaaccgagtccaacttcatccacgttctacgtcgtccacagatgatcgttcgcggcactgtgaatgcgtaaagacttcagggaggcttcggcctccctttcgtcgtaggagggtaccaaaatggcttacactggtgatccagcaaacaaccctatcgaccgtctacgagagattgtaggggacgtgtgggagcctccgatgctttccgacgaaacctatcaatgggtgttggacaagaacgaaggcaacgaaagacgagccgcacttgaacttatgcgtatgatgctcttccgcctgacaaggggaatgagagaacgcacaggtgatatcgaagtatatggtgctgagtatttcaacaactacttgaaagctcttcagctcattctcaaagacccgaatattgcaatttctttggccgtgccatatgctggcggtatctccaaatcggatatgctggctaatgacctagaccccgacaacgtaacacgggaattctacatcggttttgcaagacgggagaagctttacaaccagtgcaaccccggtcctcaagaccttagcatggggtgtgattatcttggcaagcttcagttttaaaacagatcgccgtcgcctcacatccttgattaagagggtggaggctctagacggaacaacggtagaagttggtttcttccccgaggaccgatatggttctgaaaatggaaacctaccagttgcacaagttgcagcttacaacgaattcggtactactcgcaacccaacccggccattcatggctccaacctttgaagaattcacatctcaattccactacgcaagactaatgaagtccacgttcgagaacgtcctacgcgatggaaggcagacgaatactcttctgaagaaattgggtaaaatggttgcagagcagatgcaagttaacattgacgactatccgggctctaacagtccggcatgggcagcttacaaaggatttaacgatcctctattccatactggaaagatgcttgagtctgtcaagttccaaatccatcggaggcaataatgctctatcctaccttctccatgaccaacttcgtaaagctagatttgattagaagagggcagcccggagacgacggttttggaagacctacccctccagttgagacagtagtaacaatcacagctaacgttcaacctatcgaaaaatcgacagacactcgtatccttccagaggccgacagaagcaaggcttgcttcaaggtgtactccagaggcgaagagattcgacagttaaaggaaggcccgggagggtggagtgccgatagattcatgtgggaaggagagttgtatgaagttatgaaagtcatcaactattcgatgggaatcctaaaccattacaaagcaatttgtatgagagtagagaggaatagcacagcatgatccacacagagctagaaaactccctctatcttatggtcaaagagttgttccccgactggcgtgtaattcaagcttacacgaataatcaggaaccgcaaaccccttatctggctatcgacattaagaggctggatgaactgggaagggaaaatgtctccaatatgagcgatcccattagtccttcgcatggaactattcaagttcaacaggacttcgcagccaaagtcgtattcgaactgattggcaagtatggagagacagcaagtgtctctgacatggcaatggcgattactcgggcaatgcgtactccagcaggacacgccgcccaaagaaagtttaatctatcccttttcaaactccctagcacaagacgagttcctatgctaagagaaacagatatgtacatgttctatcaagttacatgtgaatttggattctctgttatagaaaccacaactcaagagtttgctgctggggctgatattcacggcgtttattacgacgctggtcgcccgggtcacattattgagtcccacatcgacataaacttcgaacactaataggagacaggaatgactgttcttactgatgtaattgacattcagatcagccgtgagactgctgctgtcgcacagacaaacttcaacgttcctctgttcatcgcttctcacacaaacttctcggaacgtgccagagtctacaacagcctgaaaggtgtcgctgaagacttcggagaatccgatccaacatatcttgccgctgttcgctacttcggtcaagctctcaagcctcgcagtctagttatcggacgcagacaagttccttctgctaccgtctctgtcagtgttgttcaggaaggacaaagctacgtccttaccgttaacggactacctgtcagctatgttagccagcaagacgacactgctactctgattgccacaggcctaaaggcagcttatgacgtaactccggtagccggcgtaaccgtcacagacaacgaagacggaactctaaccgtcgcttctaacgaagactggagcctgaaggtttcttctaacctgactatggctgctgctccctctactgaaggttggccggctgctatcacagcagttcaaggagaaaacgacgaatggtatgctctgagcattgacagccacgccgatgatgatatcatggcagtagctactcatatcgagggcaccaagaaagtgtttatcggagccactgctcaggctaacaccaagacttccgcagagaatgacattgcttctcgtctggttgctgccgggttccaacgtacggctctaatttaccatccaaacgctgacgctcaattccctgagtgtgcttgggtaggataccaactgcaagagcaaccgggtagcaacacatggacccataaagctctagctgccgtagatgcttaccgtctaaccccaaccgaatctaccaacctgaagaacaagaacgttaccacgttcgagcgcgttggtggtgtcaaccgtacattcggtggcgctatggccggtggtgaatggatcgacgtaatgattttcgtggactggctggaagcccgcatgaccgagcgtctgtggttccgtatggctaactccaagaaaatcccttacgacgccgttggtgcaacaattctggaatcggaaatcagagcccagcttaacgaaggaattcgtgttggtggtctggctgaagctccggctcctaaagtcttcgtacctgatgttctatccatgtctccgaacatgagagcacagcgtatctttgaaggcattgaatttgaagcccgtctggccggtgccattcacttcgttcacattcgtggaactgtgaccgtctaaggacggtccttcccataaggagattactaaatggctgttcaacgtctagcgacattctctccggctgatgttaccattgttattactcaccctgcaactggtgagagcatggttctcggcggattcagcgaagacagtatcgttaacattgaaagaaacgctgacacttacgtgatgtataccggagccgacaacacatcgactcgcgtctacaacgcctctaagtctgctaccctcactgttagccttcaacaaacttcgccttcgaacgacttcctgactgctctttacaactacgacgacgcccgtcgttcgtctgagggattgttcacaatccacgttaaagacaactctggtcgttccgactacttcagtgatgacgcctatgtcggtgttgttccgggttctaacttctcgaacagcatgcagacacgcgattgggttattcatgcacacaacctgcaaactctaatcggcggtaacgccaagctgagcccgggtgatgcggatactcttcgtaacctaggtgtcacactagaccagcgctggctgtaatatagcgcttatgccacatcgacggggagctgccttaacgggtggctccctttgttgtttctggaggatagaaattgattaccacctactcgccgcgtgacgtggttgtaactctcgctggtatccattccgtgacagggtacgcagagggagagtttatcagaattgtaaaagatattaagcctttcatcaagcacggttcgatggatggtgaaatcgcaagggtctacaacaaagaccaaggctggcgagtagagttgacaatcatgcagtcctcgccgaccaatgatatcctttcgatgctttacaacgtggacattgcaacccgaatgggaaaattcccactgatgattaaggacacgaagggttctacaagcttcctagctctgacagcatgggtggaagacctacctagggtatctttctctggacaactggagacccgcacttggattctagggtgctctgaggtcgccatgaacattggcggaaacgtcgatcaaagtttggtcgagcaagctatcctgctgggaagctctcttctgccagcccttacgcaattcggaggcttctaatggctaacacggtattgacatatagcccatctgatgttaaaattgtcctttgtgggtatgctctcactggtgtagtttctttcgaaatgtcttggctttcgagaccctacacaatggttcgaggaatcagagggcaccacacccgggtcttcaatagagacctttctgcgcagattagaatcgaggttcttcagacttcggtgtctaatgatgcattcttctcgctagtagagcaagaccgaagaacacaatccgcccgaatcaccttgtctgtcaaggatacccacggtagcaccatgatgagcacagacaacgcttatgtcaatggctaccctagcataacattcaccgatggaatcgagaacagggtctggactattgatgttctggactggaccgatggcacggtaggcggaaaccagcaagtcggcttcgacgtgtttggaactgttcaaggcgctcttagctacctcagataaataaggagtatttatgttcggaaaccaacgtactgtcatccacaatgggacagaatacactatcaaccttctgccagcaactcgcggtatcagcgtactgaagcagctaaccagcttgctgggtccatcccttgccaagtatcaagctgaccacgacttctctggagccatgaaagaactgttcgataacatcgacaaggttcctgttgagaatttgatccagaatctgatgctgacagttttcaaaggttcgatggcaatcaatttcgacaccgaattcgctggcaagtatgacctgctgtacgcactcacaaaagacgtgatcgagttcaacttcggctcggttttttctctaatcggtttcgcagaggcaccgacggtataaagaccggggatgggcagtccgagacttcagtcactactgatcgagttcagagtgatcggagggttagggaggcccaccagaagttctcgcagcattgggagatttatgtggctatcactcaccctctcaagctaacgacgtatggggaactgagtacagtcctcactacagaagatttgtacaacatccttgaggttatagacgttcacgatactatcactcaagtggcaaaagaacacgcagaggctgataagaaatgattacagaaaggattgcccagctaactggggaacttaaatttacagtcgattcccggcctctcactgcttttgacaagaagctcgctggggtcgaagcccggctaagagaattctccaagctgacgaacaagcggtttggagttaagctaactctagatacaaaaactctgagagaggagcttgccaaggcagccactcaaagggtagtcttgaagaacatcgcggtagatgctgccgctgttcgtcttatctctgagaagcttcaagaaagactgaatgcaacgccgatcaggttgaagtctgttaggctagaccttagcggtatccgagatcagaaaaacttcgtaaagacggctctcggccagaccaaggtcgatctaccggttgaactgggcttggctcaggctagccgtacgctgtatgaatggaagaagcgcacagagagtcgttttaaaattcatctgaatgcagacattagccgctctaaattgctccagaatgcacgaaacacactaagggatgtgcagggtaggctaaacggtcttgctgtcgctacgcctcaaattaggctgtctgtagaccgtgcccatcttcgtagagagattcaagatgttcttgagcaaatcagacgcgaagtgagaatccgcattgacctagagtcttccatccgaggaggtggtgcaggtggatcgagaggtactgccggccatatccgtcaaggtatgggaatggggattggtagcgagctagccgggtggggacgcgggtttattcccggccttggtggtgcgttcgctattatgcagcttaaccgtgctaaccaagaactgcaaggtcaacgtctggccatgcaagctgtcggtggtggagtacagggtggtcaagagctacaagccaccctccgcgatatctctcagcgtctcggtcttgacgatagagcaataggtagctcctatgttaagatgatggctgccggacaagcatccaacttcgacaaaacacaggttgatggcatcttccaatccatggctgaatatggacgagtgatgggtctggacggggaggctatgaaaggctccttccgtgccgtagagcagatgatgggtaaaggacagatcatgtccgaagaattgaaaggtcagttggccgaaagattccccgctgctgtagctctgatggctaagtctcaagacatgactatcgcagagctaatgaaaaccatggagaaaggggagcttaagagtgatgctctgatcccattcgccagaactctagcggaagaagctcgtaaaggtggcgctctggacgcggctatgcaaggtacagccgctcagcagggccgattccagttcggatggaaccgcactatcgaggccttcgcggctggaggattcgaccgaggaatgagcgacttcttcaagattgctgcccaaggcatgaaagaagcgcttcctctggtaactgcacttggtggcgggttcgaagctcttatgaggcctgtcaacgctctggtcggtattggaggggagcttggttcccagtgggagaacattgccaagcagttcaacatgaccggcacagggctgactcttaccacggctcaaaccctagccttgctgacccctatgggcaggttgatctctgctattagctggggtgcgttggcactggaagacttcattgtcttcttggaaggcggtgattcggtgttcggggacttcttgaacaacaacgtacaagctgccgagacattcgaaaagctagccagtgaatccagtgaactgaagaacaatctcgacggtatcttctctgttgtcccggggctagctgaagcgctcaaaggtctagagttcaatgaaatgctggtcagcacgatgagagaacttgctgccatcatggagttcttcaacagtgttgtagagagattcgcaatagccggcaagtacagggacgctaagattgctgaagccggaggagacagaagtactataatgtcgaacatcgacacgatgtacgctatgttcaatccggaagatgcaaaagacaaggccaccttcatcggtgacaggctagtagctcagaacattgacgcgatccagacagagactcatacccgtgcaacccagtccttgactccagaccagtttgggtatatgatgcaacgtggtcaagttagaaacgaaatggagggtgccctcaagaagagtgccattgacattagtttcaacctcaatgtttctggtatcgatgctcagggtaacgtcatgacaactgaagcgcaagagcgagtacgagagatcgttagtaacgttcttgaggaagaaatctccagagcttcggcaagttataaggaatcccaatgacaattgctatcaaaagagagaacggagacctaatctggttcgacgctgttacagagttcggaagacagtaccgtggctctgtgagttccaacccaatcgaaacgggaggaaaaatcacagaccacattactacagaaaacccagtcttcactcttacagccgtcgtatcagacgcagacttcaacttgaacaggcccgttatcaacgacaacgaggcccagacatacaagatcaacaacaaagagttcgtgaatacgcagccggtaaccatcccggctgttatctcaacctctagactagaccctagcagaatctttccagaagttatcactcagtttattcctcctgagattccttctgcaactgtcctccctcaaaagggtgataaagtcgcttatgatattgagcgccaactgatcgacatgcagcgtaatgctgaggtcttcagtttgctggacttccgagacggtatcatctgggatcaaatcgaaagatgcatcttcaccgacttgtctttcactgaaaacgccgagacaggtagcagccttcaacctcgtatgacaatcgaggctgtgacattcacagatactcgttatgtcgaggtgagggttaacaagggtagaaagaccgctaagaaagaaaagagagacaccaaagaaggtgataccggggctagcaatgctaccagccaagactctcctacattcaagcgtagtcaaatgaaagaggctcagattagaactcaggttgcgaggtagactaaatgagcacgacttatatcgacacacttcctctctaccaagaccggaagtacagatacgcagtagctatcgagggaatctcaagagtccttcaattctactggaatagccgctctcggcagtggcacatggatatattcgacgaggaacttaaccctatcctgacaggactggcggttgttcctcagtatccgatcatggcagactacgccatgcaacatataggtttcaatggctacttcctactgatgcctgtcaacctagaacaggtacagtataagcacgatgcaagtgacattgtaccacagtttttcgaactgctatacgtgaacgttgacttggaggatgacgtagagtgaaacaatatgacagagtgtataaactaacgctcggtaacactgaatccgggcaaggtgtagagattacaaacctccaccctgacggaagtttgaacagagagggacttcagttccggtttgatatctctaaaagttcagataacaagaagagcggaaactcggcgactgttgagatatacaatctgtctattgccactctgaacattcttgaaactgagtatctgacgtgccgactagaagttggttataaggaaatgggaacttctgttgtgcttgatggcaacgtggttgaaacttcgactagaaagagtggtaacgattatgtcactcagcttattctaggtgaaggatatacagcactaacagagaccaagctgaagggcacagtatctccgggcaaaactgtaaaggatgttatcgaagaaattcgtcttcaaatgccgggagtggacagaggagcttatacaggcctcaattgcaacaacccgatcatgtatggataccaactacgtggactggctaaagacgcactaaacagtgtgtgtgaagccaacaatattgaatggaacatcagtggaaacgttctaaacgtcacagacgttaacggcccaacaacgaagagtgttcaaatggctcctctcgtaaacagagagaccggcctgattgatatcccattctacgccagtgccagcggaacagcacagaagaaagaccagcggagacggaggggcgttcaattcaaatgccttctcaaccctgagctaactcccggggttcttgtccgggtagagtcggacagattgtcaggcactttcagaatcaacaacgtccgaatctcgggcggatacagagacaacgaatggtacactgaatgctggtgttccgatcttaaccaagaggatattgaccaatgaggagaacaggcctacaagagcttctgaacctgcactcgtccacagagggttcgaagcagtacactgccataccttgtgtggtattgcgcgttctggacgattttagacgcctatctgtcgatgttagaccagtggtcaacgacctgtacaaagacggcacatcggaagagcaaccagagattctatctgtccctgtcattatgccgggaacagctaacacacttatcagcttcccattgaatgttggggatacggtgttgtgtgtattctctcaaagaactatggacgtgtttaaaggctctgccactggacagccacacactccaaacgatcttcgtaagttcaacatggcggatgccattgccattcccgggctgttcaccttccctaggtcgatgaacgaccctgcaagacatagttggccacatgataccaaagaccttactattgcccacaacctgatgacgggacaagaggcggaagttaggatcaaagccaatggagatattctaatcaacagccgcaagactataagcattaatgctcaaaatgtcaacgtcaagtgtgcttcactcactgtcgatgcagcccatacaacatggaacgggaacattgcacatacaggtaactacgtgcagactggtggaacttctacattcaacggtattccattccacactcacaaacacggtggtgttatgccgggcggcggtgttactgctgtcccacaagcttaaaggagatcatatggacttgtttgtcaaccccgacacacatgacttggtttttataaatggtgaagctccagtcactcaacgaatggttgatattgttgctcagcgactaaagatcaaactgtacacattcctaggtgagtggttcttggatgataggatcggcatcccctacttcgagaggattcttggtaagtctaggagccttcccgctgttgacgcgatattccaatctgagattatgagagaccccggcgtccttgagattacatcttggcagtcggggatcgaccctcacacacgtgaatactccatggagttcacagtcagaaccacagacaatacagaatcccttcccatcactttcagaatgataggagtttaatatggctggaattacagcagaaggtctaacgattaaagacttggaccaaatcctgacagactacagaaacgtagcctctcaggtcttcgccgacctagtttcaactggagacgaagttgacacgtctggtaactctgctctaggccgtctgatcggcgtagttgctccatcggacgaagctatctgggaagttatccagatggtgtataactccttcaacccggcagccgcaactggcgtggctctggataacctagtatccttctcggcaattagccggcatgctgcacgtccgacccgggctcaggttgttctagagggcaacatcaacaccgttattaactcgcctcccgcgaagatgatttccagcagtacaggccgagtgttccacctactacaaggcgtgatcctcactcctaaagcttgctctggtgttggaatcttccctcagacagtaggcaacgacctgacgtacgagcttaagatgtacgttgatgacattaacacaacgtctatcaagtacacaagtcctgccactggcacagtaacatccgagtccatcctagcaggactggccgccgacgtagctacaaatcacggaaataccttgacaagctacgaacagaatggtatacttttcatagtacctattgacccatttaacaccaagactttcgaagaagcctccaacctgagtattcagaaggttagaaagcttggtatcgctgttgacgacgttattggccctgtgcctcagcaagctctagctatcgatacgatctccattcctattgccggatgggacagcgttatcaaccctgttccagctatcactggccgtctgcgtgagaccgacgatgagcttcgcgagagattccgaaactctaaattcgtacaagccaccaacattctggagtccctaatcgacgggctgatgaacgtagaaggagtcgaggatgttaggattatcgaaaacgatacagacaacccagacccagttcatggagtcccgggtcactcgttccttccaatcgttcttggcggtattcctacagaggttgcacagtctatttggctgaacaagccattcgggattggctctgttggagatacagaggttcaggtggtagacagtcggggatatacccatagagtcaactaccagcgccctgtcgaggttccaatcgagatcaagatcagtgtaacaaacacaggatcgatgccagagaacattgaagatatcctacggccaaggattgtagcgtacgggaccgagaattacaagatcggagacgatgtaatttattctcgattctatgctccaatcatggaaatcccgggcttccaagttaacagcctgacgattgccaagaaaggacaaactcaaggcatggcgaacattgaaatcgggttcaaagaagtggctacattcgccgcagcagatatcaccgtaactacggtgtaatgatagaaggagaattccatggctgtcaaccaatttgacagagaagattatctggaggtggcccgggaacgggtcactgaacagtttaaagagaagccgatctttgatcgcttcctgcaagtgctattgtctggcaagtttgatatccagaatgcactggaagacctccagactctccggtctctggacacagccaccgggaagcaactggacattatcggagacattgtagggcgaccacgcggtctagtgtaccaagatattttcaactattttggattcgctggaacggagcgtgcaggttctttcggaagcctgtcggaccctacggtcggtgctccatggtactcggtcggtgctccaactggtaacgccagagagccgagcgacgaagagtatcggatgatcctgaaagcaaagatcatcaagaacagaacaaactcaaccccagagcaagttatcgaagcttataaatttgtattcggggttcctgaagtattcctagaggagtacgctcccgctgctgtccgtatcggcatcggtaagattctaacgaacgtagagcgtagtcttctattcgacctaggtggtgcaggtgcattgcttcctaagactatcggggttaactacacatacactgagttccaagctggccgggtatttgctacagaaggcttccccggaggacaaggcgttggagacctaaacgatcccactgttggtggaattctgaccaacctagtgacataaggagttataaatggctgattacagtcaactacctattgaaaatatttggtccacaggcggggatatggtagccccgacccctgcgcagcagcaaggcggatggggtattcagtcggttcctcgccaatggtggaactggaagtggaaccttcacgatactaacctagcgtatttgctacagaagggcatcccagagtggactagtacacaagagtacattgctaacaaatcgttctgcactagaggtggatttgtttacaaggctgttcgtacgcatacaggaagcgaccctgcacaagttagtgccaactgggttcgagcttttgcagattacaccacatctagctctgcacttggaagcctgacaccaagagagggtggaatcccattcttcattagcgctacaggagctagcgtgtttgactctacggcctatggtcgcggaatgttgaatgtagctaatgcctccgcagctagaagctacatttcggctcaagaaagctctgttgtactgtccaacctgtccactgtgactagggctgccaacacggttccgtacttcaacacggatacctccatggctaccttcaacatcacagcgttcggaagaggacttgtcaacgcggctaatgatgaaaacgcaagaaatttcctaggactagctaactctgctatcattacggcagacccagctaacagggcacatactctggtctatagagatgctgctggcaacttcaacgctggcgtaatcactgctaccctgtctggaaacgcaactacagctaacaagcttagaaccccagttacaatcaacggtgtggcgtttgacggaagccaaaacattgttcttccgggcctagatacaagttatgcgggaacggttgcacgtcttcacatcaacggagcgaacctttcgagtgcagataagactactcagctagcactgaggaacaaatctgacaacgactggattagccttgctgtagtggatgacaacattctccagtttgtattcagaagcgctacaaacccagttgtacagattggcaacgaagttatccttcacacaggaaaccagttctctctgggcccgactcttacagacgctaggtctcgtctgggtctcgacagactaactcaaggtagctctgatactcaagtcttccccagcaccttgaacaatggcccctacttgaccgtacaacctacggctatcggaggattcaacggtagcactaacggatggctgttccgattcgacgctaatggtaacatgactcatggtacagttcctgccgctagaatcactggtctgtccaactcggctcagattccagccacaactacggcgcaggctaactctcttgttcagagagacgcagacggaggattcagcgctattgcgattaatgcgtatggcactatcgtcgggtacggctctaacatcttcagtagagcatcgggcactggcaacgcccacatcgggttccagagagcgaacggaacagaactcggtcttatctggggagcccaatctaacaactcgatgaacttccgagttgctggcggagccaccgcagtgtcgattaccggtctggacatgactgttactggaagagtcaatgctaccacactaaacgcctctggaaacgtgaatgcgacaggcaacgttaacgccgggagcgctacgctcaatacagcagggaatatcacaggagccgcttacggagcctatggttctctgaccaactgggttgattcggtatatgccaagaagggagaaattcctaacgatatcgcaagagccggagccgcttgggacgctgtaggtcagtatattctggcgggagatcaatctggagggtctggtggaccggggacaactagagctggaagccagttgaagccttattcgactattagctacacagcaggggcactaccagcagcaggcacttacagatgtatgggagcgtttgcaggtggtggtaaccagattaccctgtggcagagaatttcttaatagagggcttcggccctccttttagaggagattatagtggaattcagaaatgttgtaaaatacaaaatggggttcgaatgcgaggtaaatcatcctcagtggggatggattccgttctacgcttgtgattacgacgatagagccaaactggtatatgacgccatcgcccgtgctgtcgataacggagaaatccccgaaccaaaggacgttacagatagagacctcgttgtagatgcacgtctgtggagagataatgagctaacccgggctgatcgtcaagtagaaattgctatcgacgatgaagacgaagtaaaagagaaggcttggcgtaagtaccgctctgcactacgtaagtggcctgagcataaaaacttcccagccgagaagagtaaacccaaagctccgaaggagtgaggtaagataatatgccaaacattatgaagcctacgggaatcaacgctatctggtctgaaaatggccagaaggttgacccgggtgctgtgaaagtagggctaggctgggttacggaacttcctccgtaccagactgcaaacttcattgaatataaacaagacctgtttaacgctcacgtcaaccaacatggtatccctgaatgggatagcgtgacagagtatcagggtaacctgagctacactcaaggcgctaacgggatcatctataagtgccttagaacccattccgacaagattccaactgaccctctgaacattacagccggatattggcgagtggcgtttgaggatgcgggagaggcagctaaggttcaagccaaccttgatcggcatgtaacaaactacaacaccctctctgggattggcaacgtagttattgcaagacaaaacctaagtgtgtatagtaaagctgaaggcgacgcccggtacgctatgaagcacgggaacggctctaatgttttcagcgtcgccactgccacacagccaactcacgcgatcccgctgagccagctatcgactctcgttcctcctgcgaccgagactgtagccggggttatggcagttgctacgactatcgagacagaagctggagccaatgataccaaggctgtgagtccgctcaaggccgcacaggtgtatctgaagaagaaagacaacctttccggtctgtctaacgtcactgccgcaagagctaatctaggactgtcggatacagcgactatgccttcttctacattcctgaaggcaggtagcaatctggcagatgtgcctaacaaggcgctggcaagatcgaatcttggaattacaagtagtgctacccagccggaaacctatttcttgaggagcgctcagaacctagcagatgtacctaacaaggcacaagctagagtcaacctaggcctcactgggatggctacaacagaccctgcggcggttatgatgaaggcagacaaccttgctggattggctaacactgctaccgctcggtccaacctagggctaggcacagcttctactagaaatacaggagacttcctgtcgtctggggataacctgtccgacctcacgaatgtccaagcagctagaaacaacctagggttgaagggagcggctacgctcgatgtatggggtcttcctgcgaatacaactgccatggacttccagtctaatcagtcggatatttccagaggatgggctcgactaccaaacggccttctgctacaatggggaactggtcccggtctatctgatgacacaaggacgaatatccaactccctgttccagcacgaatcttgaacgttcaagtgaccgtaatggggacgtttaacaactccatcggcccgggcgctttcatgacggatatgtggagcaacaccgggtttagagttagctgcaactggggcaactggtcttacccgttcaactggtttgctatcacttccaccctgtaattcaggagtatcaaaaatggctctaactgagcaagacttccaatcggctgccgatgatctcggagtcgatgttgccagtgtaaaggccgtcactaaagtagagagtcgtgggagcggctttctactttctggcgtccctaagattctattcgaaaggcactggatgttcaagcttctcaaaaggaagctaggtcgtgaccctgaaataaacgacgtttgcaaccctaaagctggaggatacctcggcggacaagcggagcacgaacgtctagataaagcagtcaaaatggatagagactgcgcacttcaaagtgcctcttggggcctattccagattatgggattccattgggaggcactaggttatgcgagtgttcaggcatttgtcaatgcccagtacgctagcgagggatcgcaactaaacacttttgtgcgcttcatcaagaccaacccggcaattcacaaagctttaaagtctaaggactgggcagaattcgcaagaaggtataacgggccggattacaagaaaaacaactacgatgttaagctagcagaagcctatcaatccttcaagtaaatctaggaaggttcctaatgaagaagctattcaaaagctggaagttctgggctgctgtaggctctgcaacttttatggctctggaagccatggttcatctttgggagcctatccttcctcccggcgtgttcgccgcagtagccacactggtagctgttggtgtgagaatttcggcagtgtttgtaactgctggtaaagtggaggaagcgatttcggaaaccatggaacatgacaccatagaagatggctcaatagaaaatgatactaactaaactcaaaaactacgccctcgtagtagctgccgcaatggcagcagggtttggatatctgtcgttctctttgtacggcgacttagctgttgcgaagaatgatatccaatctcttcaagctgcgtctcgacagatggaagagcagttccagaaagagcgagcagggtgtgagatcaccactgggagactagaggcgcatatagtccaaatgaagagccgacaggagcttctacaaggccacctgtgcgagcttgagtctctacctaacccaaccccaagggagacccaagaaaatgccacagagacgatctctgagccttctactggggatagtctggaccctgctcttacaagcttgctcgacagggccttctgttccgcagtaccaaacgatccttattgtgcccccggcaagcctgaccgaggaggttaaggtataccgagtggagcaagatacagtcaaggggctcgctagagcttacattctaaatactaacagtgctgccatgtgcaatagtcaactacagacaataaagctatgggcagaagagcagagggctctatatggaaagtaaagacggcaaagaaggcctaatcaaggtagctacacagggagttatctctctgctaattgctatcctaatggcttggtctggattcctaagttccagtctttctaagcaggaagaacgtatctttgcgatgcaaagagatatggtatccgaggcaaaacttaacgcactagagtcgagattcaatagccgacttgaaagtgaaattagtaacgtaagaagagaacaacaagaaaccaaccggtatttgattttgattatgaatgccgtcaagggtcgggatacagaaactcaataactataacccgttaacccacactgggagacaatataatgacaaggaaacaagactggccgctagtttcagcagtcggggctttgtttatctccctccttgtctgtatggctattctggctttcacagcgatgactcccgaggctcggtttgactctgtacgccagacctacgagattcgaattagcgaatctgagcggcggtatgaactcaaactgaacagactacaggatcagataaactcggcctcgtacacacaggatcggcaatcccgtttgcaatatgaagaactcgactcgcttaaaaggaagattagcgaacttgagcggagaataaaagaaaaacaagaataattaagccccgggagcgaaagcttaccggggctctttgtcatgggttttcagcgaacaacttgataaacttcatcgaacaggtcatcaagcttctggataaccttcttagccagcttcttgcgaactttgttagcctctgggctggaatggagtagcttaatatcggacgcgttgccccagtccatcgccccgttgtcgaacagcactttaacattcagatgcatcgagccctcgtcaatatcgacaactacgccggtcatccgagcgttggtcttttcgaaggtcggcctcggaatgtctatgtccagactgccaaccataacaacctgccctttcttaacgtcaaataattccatttaaaacctccttaatctaacttcattagtgtgttgaactgatgcctcagagacttaaaagcctgtggcccatcgtcttccgctccttcatgaatatgatgagcgattaagtgtatcaatcctcggtctcctagtaacaaagaactaggaatttcttttatccaagccacaaagcaacagaagtgtagaacctccggcatggaagccttgaagctggaatcatccagcttcgataggcgttcatacgtagctttaagatcgggatagcttaactgatatgtagcatcttcgtcaatatgctggtcccctctaactacatactgcaagctcatattacaccttctttccgccttctgcaagacgtgcctctcgcttatggtcggaacgggtcatattgtactcgatcttctcgatgatcgcacctgcaacatctagacctcgaacattcgcgtagtccatgatacgaatgatagcgtcagccagttccacctcttccatcttccgctctggcaagtgatcgtccatcaaatccttacggactccttcagccgcttcggcgatttcagtggtaacgagcatcagcatgtgcagagcatcacgtttaatcggctcgcctgtgaccagatcggtgttccacttgcggttaacaacctcaaggccagtcatcattttgttaaaaccgctaacaaactcgaagacggactctcgttcgaatagttcaccgaacgttggctcttgatcttcgacaattgcagtgtggaaaggccactccatccaagcgtcatagcactttttgataagctcttgttcgtcaatgtatgagaagaaatcttcatatccatcaatcgcattaacaacttcagttcccctttcccaattgcgcttatcaataagtctctggtcgattcgcagggaagtgctgccaacttcttcccatgatctccagcctactatgccatcgccgaagtacaacagaatgggcagattgaatccgcgttcttcctgatccttagtctccatagctataacaaacgccggtactttttctccacttacgccattggccaagacgaaagaacccaagtgggtggtctctcggctagctgggcgatgagcttcctcgatatgatctttaactctactcattaacttcaccctcctcgcagaacatttcaaaataacaatcgacacaagttagcatgccgtcgtcgcttacaacctcctcgggagggaagttgttcccgcaacattcgcacacaactcgatcaacctccctgcatccccagtaagccatatttactcctccttcagaagatactcattgctaataactttgaagctgaagtctcggctcatgcttttgaaaaccaagccttcccggtacttaccgttcaacgcagactcgccactagccattttaattacgagttgcatgtcttttggaacgcctacgtcccacatgtacaccggcacatgtttgaccgtctcaccacccaactggttcagcgtattcagaatggcaagacgctccgctggaagacagtaacgactgtccgaaatgttgtagatatcgtacacatagtattccggtttgtcaactccctcgaagttgccttgaatatttggtgcaaccagttcgccttgaagggcaatattcagaccgaaataccggagacgttcaccaagattaagctcttctgccatcgcagtgaagtgattggagtctttcttaatcacacgcttccagccccgacccttgaagaagttcttgatagcagtgaagaacccgatcttctcgtcttctagacggaaaccgacatttcgagacgccacgcctacttctccgtccttgtgccagatagtgagagacgaaccgtccaatttgaatgtcacttcaaacttctcgcccttctgatgagcctgatcgtaagccatctgaatattttgtacgcgagcctgatccgtcttcgggatgaagttggggaaccctagcttggaagtgccagtccggctgcccttgttgcctccattgatagctgcctgctcggaaggctttacatacttcaggatgcccattcgatcggtaacatcttcgtctactttcggctctgggctgcccgctgcatgaacaggtacgatcaggccttgactaagctctttacgaagcttcatggtcttgattcgagaatactcttttccaccttgttcgaccatattacggcctcgcaggaattcaaagatagggttatctacaggcaccatggaatccacttcaatgtagattgccagatcaccagcctgatattcccctcgtttgattacgcactgccaaccaccaacaagcgccagatcgaggctgtcagcgttaggatgggtcttcacatcgtcgatacgcaccactcgggctagtacgcggtcttgggaattactcatatattatcctccttgtttgaaaattggtatattacttgttaaaccagccgagatcaatagcccgctctagggccagtagcagattctcagcatctagaaggtcacggatcgcgatccaactaccactgtctcccggtagaccgtctgtgatatacacaggtatgtcactgtattcgctctttttaagcccgcaggcacaggctacattgtccccgaagacaatctcgctgacttcccttgcctcgtctcgaatatcgatcttcacacctaccctcctgttgtgttgaaagttgttgtattctgcccggatatcttcgcagtgtcaatagccttgacaagaaaataatccgtgatagagtgaggtctctgctggagagaaatgtccacgtcactcaccggccagcagtatagcgtatgaagaggaaagctgcaagcgcaacctgagtcgaatctgagaacagggcagcgacgacccgaaaggggaaagctcagagcctataaggaacccatgttccccgctcaccgactcatctgcatatatgtatatctgcatgagagcgagaggtagaccaaaggcatgtcttaggcggagattccgtatggcaagccttgggacaggtctgcctccactaccgatctatctgcataaagggggtacaatgtattcagcaactgttgtgaacagacactacgagaaatttgatgtgtatataggaagggggagcaagtggggtaaccccttctcccacaaggaaggcaccagagccctctacaaagtagatacagtggaacaagcaattgagtgcttccgaagtcatctttggcgtaacataatggaaggattaatcacagttgatgaccttctggagcttgacgggaagagattggggtgttattgtaagccccgtccttgccacggcgatgttctggtgagggcaatcgaatgggccaaacaacacagaggagtgtataaatgaaacatgttatttaccgagaagacctaatcgacctgttacgcgaccgtatgaagctccaagcgctggaggctggtggcgttgacaactgggactggtatgaggcctcgcttatcgactgcggattcttcgatgatgacgggcgtgagcttgaggtcgaagcacttgcagattgcttcccaaccgtaggtgcgtaaccgtggaggagtcgaaagctaccttcaaagacccttaccctaggttcttcgacgcttctcgtaggtatggcgaaaccaacgactgcatggtggtgagctttgcagtcgtatggaacaccacctatgaaaaggcacaccagcacctgaaagtgaagtgcaagcgcggttaccggcaaggggctactcagaagcgcttcagctacgcagacacttggtgccctaagacccggatgctctaccgggaggatgctaaggataagactcttaggcagtttgctgaggaaaaccctgaaggtcggttctggatcgcggtaaagggtcacgctattgcaatcatcgacggagtgttgtacgatcacactaatgacaaaagacgcaccatctggcactgctggcaagtgtggcccggggaggcacctgagaaaatcgagaggaagcctgatccaatctcacctcctgtgagaaaggccccagattggtatgtctgaagattacaactgaggaggaattatggaaattatttcgagagggacgctccctcaagaggttttgtttacggctaagtgccaccactgcttgagcattctccgggctaagaggtcggaacttaagtatgtttcgttctcattcggacgccccggggagactgggtattatttcgcagagtgccctgtgtgtaacgaagaggtgtctgcttgggttgtggttcctaccagccctgtagcacctcctcccactgtagagtatatcacaaaggagcgtaaataatatggaccagttagcaggattcatgggcgaacctttcgtaattgcgttcgactacgacgagacgatcagtctctaccctcttgccttccgaatcgtcatggataccttcaggggctttggaggcgctttcaatgtgatcgtagtcactgcacgccaccctgacaacagcggagagttagagtggctacgggactacgggttcccgatctatttcacggcacagaaggcaaagcgaccattcatggaaaatcttggaataaaagtctctgtatgggttgacgacaacccgttcagcgtggataatgaccttcctccgtggacagcggagcaatacgacgcctaccttgaggcaaagaagcaacgagctatcaacagagggagtaaagcatgagcgagattattaaggttgaagtgggagatcgggtggtccttaaggcctattgcgatacatacactggatgtgcaaagcgatgggcgcaggcgcatggtcgtttgcatgaactgctagctacggggtttgtagaagacagttgggtccacaccgacgaactggccggaggcttgaaaggcaccgttgtgatgactgaactgggactgaaggaagagtgctgtgcagtacgtctagacgcctacactgaccacagggctgttgtagttgttgacgcttctgatctttacatcgcatgtaaggcagcaaaagctcccgtaagcaccctagacgaggccttcggttgcgaccacgactaccttatggaatctccggctaacgctcagcgactgaatgagtccgtcgagcagctacgaactggccaagtcgtagaagtggacgtgcctatgagtgtaaagcaagacgaaactccacctgtcgtagtgcatgtagtagagaagatttacgataggaaaggtaacgtacacctcattctacagtatgaggtagcaggggcgctaatcaggacggtggttgaacagggagaactcatttacttcttggatgaaatgcaaggtatgtacttgaccaagattcaattggaggtgaacaatggagttgtatgaccagtggcgtaagtatatgagcgtcgtaatcttagaagaagaagataatgagcgtcagtgcatgcggcttattgaggcagttggcgaactcgatccctatatccaagatttcctagattctttctctattaaaactgaaggaggtgtgtaagcatgagtcagagtaagcgcgatgagattgtagttgaagcacgtgggctagagagctacttcatttcccactggaacggctgggatgtgatggacactgcttgtctcggattttatatcaaacctgagtatgttcttgacccggatattcgagagcttgagcctagcttcttggagcttgatttcgagcgttgccgtttccgattctggggaaatgaagacgaaggcgtggacggcaaactcatggagggcaagttgcagattatgaccaactccttcgagtacgtcttcttcaaggaggtttgagtggctagacagacttacgagtctgcatcagatagggcggtcgaggaggccgtccgttctgagcttgaagggcggtggaagtgttctcttcataagctacctagagcccactatatggattgggcagcctgccggaatggaaaggttgttagctttgtggagcttaaggctcggaataatgaaatgcagaaatatcccgacttctttgtgtcccagatgaagtggctccatgggatcgaaatgcaaagggtgtttgacattcccgcattccttgtggtaaagtggacggactatacaggatatgtcaaaatgacagccaacggcgtcaactacatgagcatgggtggcaggattgaccgtggagactggcaagaccaagaagttatggtccatatcccgctgaaagacttcacacgtttataggaggacacatgaagagactctgctaccgttgcatgcatcttggagagcctgtcatgctccgtcataagacgggtatctggtacaagggttgtagtaaatgtggatcaggagtattctatggctaagaagaaccctgtattcaagtttctgaatacagtaaacaagccctcagtggagagggataaaaccaaatacaggcggaagcctaagcataaacagaaggagcgattaaatgaagaagggtgataaagtgaggatcaatgatgatgctgataccatcttccggggccgtgttgccactatcatcgcagtagacgaagagggttgcgttatcgacgttgggagttacgaggatgagagcggagagctgatcgagtaccttcacctattctttgagcgttctgagttgtccaagcaggcgtaggagtgtataatgaacggacccgagtgtagatggtgcggagagaaaactgaagctgagttcgtagacgttgggcttggatggacgcagcaagtcactggaggcatgtgtcaccagtgtggagggtacgagaacggttactaccagaacgacggaaggctcacagaggtcgagtttgccacctactggagtggtccgttcgaagattatgcggatttctcgccattcaatcatatgagagaaggcgactcgccatgaaggctacactgagaaaccacaatctgctatacatctacttccacacgttctcggaaatgaatgagtggttgacagagaacgctgtagatcagtggacagtcactactctgggctccggctatcaggtggctgttcctatggaccgtgcaatgcgggaccaatacgtctcggaggggggttgacacgaacacaaggtgatgctaaactccgtggttgtctgaagtaaggaggttttatgtccaaaatgaccgtggcccaaattgcggctatgcacggtatcgatctgtattctgaccacaagaccgcttgtccccaatgccggaagaaaggcgctgacaacagcggagacaacctaaaggtctatggtactgatcgtaataccggggaacacaaaggtgcctattgttgggcgtgtgggtacaccttgctctctgaagagcaggaaagagacgcccggggagaagacgaagaggagtggaatttcgtgggaactgaatttaacgcagagatcaacgctcaaattaaagagcaatgctcgtatgatccgcgtggttatcgtggcctgtccaaggaaacttgccagtatttcggagtgctacatggtttcgacccggagactggcgagattgcaactcagctatatcctactactactaattatgaactcactggctacaaacagcggatcatgccgaagaacttctcagagcctatcggcgagaccgggaaggattgcgagctttttggtcagttcaggttcaagaatagcaacagcaagaaggtgcttattgtaggcggtgaggttgaccagctatcagcattccagatgctcaaggagtatgatgaccggcgagcaggcggtaagagtgattatgaaccgactccagtggtcagccctactatcggtgagagtggggcgtggaaacagctacaggctcagtacgagtggctagaccgattcgaacaaatcatcctctgtttcgacagtgatgatgcaggacgagaggcagcagacaaggcagccgataagcttccgaagggcaaggtgttcatgatggaaatgaaccgtaaagaccctaacgagtatttgaaagctggccgtcagtcggagtttgtcagtgcattctatcgagcccgtacatggacccctagcggtattgtagggtctgatgcactcgacgctcgaatgtatgaagctgtgcaggttgagaagattcctctgccaccgttcgctaagaagctccagaaggctatggcaggaggcatcccgttgggccggattgtgaatatcggcgctgcatcgggcatgggtaaatctactgtagtggatgagttcactctgttttggatttataactcgcctcatatgccgggtactgtgactctggaatcggactgcggggagtacgcaatcaagctgctgagccgtaaggtaggcgagaaggcagacttgtacgagaccgttgaagagaaagtggcgttccttgatcggcaccgtgacgctcggtacgacttgtggcacaaggaagacggaagcccacgcttctatctgatcgatgaccgagacggaagcctagcagccctcaaggctcaaatcgaacaactgattattcagtttgagtgccgtgttattattctggacccgcttcaggatattctggacggattgagcaacgaagagcagtcggtattcatgcgctggcaaaagggtatgaccaagagccaccgagtgacgttcatcaacatcaaccacgtccgtaagagtggtggtggtcagaaggctaactcggcaggtgctgaactgtacgaagaagatttccaagggtcttcgtccatcttcaaatctggtgcagctaacattctgatgtggcggaacaaggacgcggagaacgagttcgaaaagaacctgattaacgtgaagctctctaagtgccgatggactggccgcactggaatgatgggcaattggtactacgacgttgagactcatacaatctgggacttggacgactatctggaccgataccctgacaagcgccgtgaacacgaggcttggatggctcagaaggaagaggaaggccgggacacggaatactaaggttgacagaggggtgatgcttatgtatcatccctttcgtcgtttacaggaggaaaggaaatgcaacaacgatttgaaacaatcgagcaatacctcgaatggatgggaaataacaatttcaccaacatgacttgggatatcgaggccacaggcctgttggatgaaacgtctatcgattacactgccagcccctacaagattaagcctagctacaaacaccactgcattgtagtggaggagcacggtggcaatattctggcattctacgatgggccgacctacgtctttgacgggcgagagtacactgagagactgccgaaagcgtcttccatgctccacactgaagaagttgtgactctcaaggactacactccggtagagtatattcacctgccgctgaaagagttcaagaactatgtgctcaagcgcaagatcaagcgcgtagtggctcacaacatgattaacttcgaccttatgtcgatgaagcttgtggaagatatggacttcactatcggcgtagagcacagggatggcggtctgactacgtggtctgctgacacttggatgggcaagcaagtggtattcgacgataccctcgttatctccaagacttgtaaccctgacctgttcggcggtcacagtctggataagctgtctcgtcgtgcaggtggtgacaccaagattgacttccgtaagcatttggcaccggatgttcgattcctcgacttcgcagccgatatgctctactactgtatctatgacgtaaaggcgaacaccgctgtatggcattggttgcaggaccacgaagattaccaactgtccgaccgtgacaactacatcaagaattggctgtccccgattcagttggagaagaaggttgcagagatcatcacctatcaggagcaccgagggtttgttctgaatgttgatctctgtgaaaaagctgtgaaagacttggacgccaagatggaagagcgtcgggcccgggtagagcctgtgcttcctcctcgaccagctaccaagaaattcatggcagactacacaccgcctaagcggcagttcaagcagaacggggagatcaccagctacttgcagaagtttattgagcggattggggctcagttgaaagagggtgacgaccggacgatgatcttcgaaggcaaggagtacaagcttccgcttcccgctgacgtaccgctgaagacggaaatgcctgctaagatcggggacacaactcacatcaagcaatggcttatgggtgagtttggttggattccatcagagtggaaagagactgatctgactgtggatcagaagaagatcaagcttccgatggaaaacatcgttgctaagatcgatcgctggctggatgtaacgtatagcacagcgtacaaggaagagcggctggacgggttcggggattacatgaagatcacccctcgtagcacccgcgcgtatgtacgtcagaggttgattgatcgtgcaagcaaggggagctgtaaggttctcactaaccctagcttcacaaagggccaagagaaagaaatgtgtccagacctcgaacgcattgcagaacagtttccgttcgcgaaggatgtgattgagtacctgacctttaagcaccggcgaagcgcaatcctcggtggcggcatggactgggacgaaatggaggatggagaggagccggaaaaaggttaccttgcaagcattcgtcaggacggcaggattcccacgcctgctgacacttgcggggctgctactagccggatgaagcaccggaaggttgctaacgttcctcggatcacctcgttgtacggggctgagcttcgagagttgtttggggttggagatgggttcttccaaattggatacgacttcgattccttggaagcacgtaaagagtcggcctactgcgatcagtacgatccgacaaaggaatattgcaaatctcttatgatggagaagccatttgacgttcacacaatgatggctaagcgtatttctgagatcattggtcgtcaatttaaccgatctcctgcgaaaaacgtaaaatacgggtgtacgtacggtgcccaagctggtaaagtggcaaaaaccattggtgccgatttgcaaacgggtcaactggtattcgatgcgttctgggatgcagcattcccattgaaagctctgaaggacgacctcaccaagcaatgggaagccaatggcaagaagtatatcattggagtggacggtcgccgagtccctactcgttcggctcacgctatcctgaacagcttgttccagagtggcggtgttatctgtgctaagcgggctatggtgattcatgatgtactactggagaaagaaggtctgaaggttgactttttcaaagaagactggaagaacaagccggaattctgccaacaaatgatcgcgtaccacgacgaagcgcagttggaagttacagctaagtcggtcagcttcaagatgttcccttggtctcttgtaggcggtaagccagaaggagaaaaggaacaggaggaggcggagaagaagctgaaagctctagctcaggcttacaaggacgaacaattggctagtactggcaaggtgtggagtgatatcgcacactacagcaaaggtgaaggcggggtgtttgtagcttactgccgcgctggagaacttgccacgaaggccgtgagagctgcgggagagttctactctactcctctggtgcctatcgagctgaccgctggctacatcgttggtcgatcttggaaggattgccactaaaactggcattaagcgaggaaaggggcttgacaggcccctccgcctcctatacaatggccacatattcacaacatacaaggagaaacacaatgactctggctttcattatctatctggtaatgaccgtattcccagccttgtcgtcggctggtagctttgccctgatcgtcaccatcatcgcatgggttgcaggagggttcgtttacttggcatccattggtggccgagagaattcggcagttaaagccacactcaaaaatcacctacggcccttgacgttcaagctgtttctgcctatcattgtaatcggccatctggtgccttcgtctgagacggcatggtggatggtcggcgggtacgctgcacagagcctctatcaagcagacgctactcagcaggttctcagcgaatctactgaactgctcgaagctctggttaagcgggctaagaaagaaactctgaaggctgttgaaggcagcagcgagtgatacggtaatcacagaataggaggtatggtatgaacacggctcgactctacgtctacggcaaatcgtccatggtaggaatcactgttgacaacaaggccaatcgggagtactatacctctaaaggcttcgaggtatcggagacaccgttagcccacaaaagcgtggctaacaaatacaaacagaaaggaggtaaataatatgtctggtgttattcccgggactatcgtcaaactcactcaagtgggatgtgacgtcaccgttggctggccaaaggaagcccgatatgtaggcgcatacgcagtcgcagtagatggacgcgatatcggtctcccggaaggggaaatccggttctgctcccttcattggtccattgaccgagacgtcaatgatggacttggagactaccaatcgatgctcgctgacaacgaccgcttcgaaattgtagcagttccgggcaagaagtattacgttaagaacgttgccaagcacagcgcacagatcggccattacttggttccttcggagccagccttgtacgtaggtttcgagccgtgctggctgaagagcatgcacgaaggggagagcccgttctgcatgacttttaaaggacgcgttgacattggcggtgaaacctctgacaagccgcagttccagaccctctaccctgagctggtactggaagagtttaaagaagaggcggagggcaaggttgaagctccggttgacgaagagaagaaagaaaaggttgcaaagcctgctgtaatgggttatgctgttctcgatgcagacgggagtcctcttaaattctgcctcactcgcgaagaagcccgagccaccaagcgctggtggggtggcaaggctgagggagtctcgattgtaaaagtaatcaaaggagaggaggtgcgttaacgcgcttctcctcttgcagaatccgggaatgtccggtatgatcgtcagtcaagtggctgacacactcgcccagtctagggtacttaaataggagaaatgaaatggcttttaaactgaacgtaaccaccaacactcaatccggcaacggcggcgtccgaaaggaagtcgattgggatgctctgaacaaccacgtagttgaagctgctggcactgccgctaaagcgcgttcgatcccgggttatatctccggtatcatcgatctcggcgagcaagagcagaacgatgcagaggttgtgttcactggcactgccgaagatgaaatccaaatcatcaaggaatatccgaacacttacttcaaggatggactggacaagcagactcgcaagcctgtacgtctgaagtgctggccgcagcgcgatatgcaacaaatcgcgatcactgtggacttccctcagatcgaggtagacaagagcctgtacctgaccggtaacagcaacaagtctccgcttcgtgtcctgtacaacggcgactttactctgccgggtcagaagactaagattgttggccgtccgtttaccatcaaggaagtgaagcacccgaatggcaaatgggcgttcgccaagaactccatgttgcacaaacttgctgtggctactggcgtcatcaacgaagacgaactcttcaccaaggaccgcgtaggcgagcttctgggcaaggtggctcagttccaagtgcgagtgtggatgaagccgggcaagaacgatatgaaattcctcactgaggatatcagtctggtcggtatggttcctgaaggtgttccggttcccgagctggacgagaagtacatctacggtgtcaacctgtatggcgagaacgacgaagaagcagtcaagcaactgcgtgctaacgtcatcaacaccatcaagcgagccaagaactacgaaggttcggatatcaaggcgatgatcgaagccgttgaagctgcacgcggtggtaaccgctccagtggcgacagcgaagagcaagctgaagataagccgcagacccaagctgcacctaaagtggagccggttcaaaccaacgtagatgatgacattccgttctaaagggcggtggtaagacaaggggcttcggccccttcctttcaaaatttcaaaggaggcaacacatgcaaatcaattttggtcccatcttccttctcgcagcaatcgtcctgtgcgttctgaaatctgccggagttctcgctatctcttggactgtggcactcatgcccatctggattcctcttgtaattgtattgtcgattctcgtactgtttcttgtaattgtaggtctgatttacgcattcggcgatcgtactaaactgaactttagctttaaaaagcacttccggaataagtgaggactaatgatgagtagtttggttattgttcgagtacctgagtacattctaaaaggccccacagtaaacaaccagttcagcggtgacctgtgggagcgaaatctcttcaaagatttgaagaacgctgcggagtgtatcattaaaggagagccggcttatgttgctcttcctaacaaggtaaaccctgacactctacaaacagagtgggacattcaggttgtacagttctaacccaaggggagcttcggctccctttttcattggagataaaaatgagtgaaaaggaagaggatatcgtcctcatcgacggcgaccttatcgcctttaagtgtgcaagtgtcaacgagacccgctccatcattgtcagaaacaaattgacaggagaagaggaaacttggaagaatcggacgacttggcgggagaataacaaagacgaagagggattcaacgaagacaacttcgaaattgaggaccatcaagaccccaagcacgtgtcctacggtatctctgttgttaagaccatgatcgaccgaatctgccgccaagctgggtgcaagcagttcaagattctcctatcaggccctgataacttccgtgacgccatcccactcccgaaagaatacgagattaccaagggtaaaaagaccttcactcgtggtggcaggtacaagggtaagcgtacagggcagattaagcctcttcagctaggtcagctaaggcagtatatgatcgaagcgtatgacaccatcatccatcccggagaagcggacgacttgatggccgaaatgatgtacaagaacggtgtaagctactccagaggggagactactcagcgcgtgatcggggctaccatcgataaagacgcagacggcactctaggatggctttgtaactacgaacgtgagcctgttcaagtcaagttcatttcaggcctaggatcgctctacagggactctaagggcaaggtgagaggcgagggacgtaagttcttctacttccagcttctattcggagaccctgttgactgctaccgacctgctgacctgtgcatcgggaaggacttcggagaagtggcagcgtttaacatcattaatccctgcacaacggacaaggagtgctggcaagcaatctacgacacctacaaatcgtggtaccctgagcctgtcacttacacagcatgggacgacacagagcacactaaagatgcaatcgatatcatgcaaatgtattgtgactgcgcccacatgcaacgttgggcgggggatcgggtagactgtagggctgttttggctaaactcggggtagacttaggaggtgcagaatgagtgtaaggcctcgcccttgggaagacttcccgggcatctggaagaccgaagccgcgttcttgagttgggtcagaggtggcattcgccgctatctctggtctaagaacccggtcaagcttgagtttgctaaatcccgaaggatcaagatagccaacaccaatgaaaagagcaagctcaggaaccccactgtatggggctatgtgtgcgagcagtgcgggaaggagactcctcaagctaacgttgagattgaccacaagacgggggagttctccctgaagcgagtagaggatatccaagcgttcgtggaaggtgtggtgtttgtccgcataggagatttggctgtcttgtgcaaaccgtgccatgagatcaagacctatgcagagcgttacggactcacccttgaagaggcgggtatcgtaaagcaagctattgcaatccagaagcagaaagggtatgataaggccttcttgcaggaggtgggaatcaaacccgcatccaacgcagagcttagaaaagaacagatcattgaataccttaagtctaagaaggagggtggatgaacgaggatcgggtttacattgtagtaagagacgaggcaccagagtacatggtgccgactctggttgcacatagcatcctaggggcagacatggcaatggttctcctcggacaggaccgggccgttccatcgacggaccttccgtcccgtccgtatatgcatgcagcggcaaaaaccgccattaagtgggtggagtggaaacagtggagcttccgtaagatcgttgtacgagtttctgacaaagagtacgataagatcaagcaaatccctttcgtatatgaggggtatgagagaaccatctgcaatggcgaaggctcctgcctagtagtacctcctctgagcaaagaggagaccccgaatgttcttaaatttgcaaaattatggaggcctctgtgagagagaagtttttgagaattatgcggaagctgcccatccgggtaagggcttcccttgttatggcttggattgctctgttcttctggctcccggttgcaactgcgctaatcgttggaattctagagttcttcgataatgcaaaagaagagttaagaaacggatactctgttttgatcgaagctgccaagggagcttaccagtgcattaaaacgggagaggagttggagtcatgaccaatttagctacgtatgttatacgccacaaaaagaccaaagagctttggaccactcctaaaggaaagcggcaatggaccacgaaaggaggggcagcccgagcttggagaaacgcatatgagagtactacactaggagcgtactatgctaaaagagatatggaacggtggcctgacctgaacattcctttgatagtaggggccgctcccgcacgtctggccggctgggaagcagcatcttttaaaaaccaatcagctttcgagattgttgatattgctgaatccctgaagcacgaaagccagttggtgctcgatctactgaaagatgttattgggttcgaagtgccagaccacatcggagacggatatgtccgactcaccattaaaacgtccacatacgacgatatcatcaaactactgaaggaggcaaaatgagcatgactgacccccgagcgtatttcatcaaacaggagctggaggaagcaacgaagcttctagaaagagccctcaaccttctagataacgtccattgctacgatacagatgtatacgaggacattgcagcattcctctacggtcaagagtgcgaggaggaataaggtgcagcgcgatattagtaaaactatagcagaacttcgggacttgatcgaagctgtctctatgctcgacgaggccttggttatgatgcagaaaaacggactatatgatacggacttgtacaaacgtattgatgcgtttttgtattatcaaccgggcgagggcgagtgggaggaagtagaatgagcagcaagaaacactttgtaatctctgatacacaatgcaagccgggtatcagtctggactacatggaagctatcggtaagtatatcgtagccaaacgtccagatgttgtgattcacatcggggatcactttgacctcgccagcttgtcgtcttatgataagggtaaacgctcctctgagggccggagatacgccgaagacgttcaagtcggacgtgagggtctggacaggctgttcaagcctctgtgggagctacaggagcgtcaacgggctaatcggaaaaaggtgtaccaacctcggttgattttcacactgggtaaccacgaagagcgagcagaccgagcggccaacgacaaccccgaattgtacggcacggtcggaagtgaggaactgggtattcaggattatggttttgaggttgttccgttcctgaagcctatcgaggtggatggcatctattacgtccactacctacaaaaccacttcactgggaagcctctgggtggcacagcgaacaacatgcttaaggctgccggtcattcgtttgtcatgggccaccgtcagcttctggactgggcgatccatcctacaattgacggaaaacaaaggctaggcattgtgactggagcgtgctatcctcacgacgaggcttacaaaggctatcagggtaacaatcacttccggggttgtgttatgattcacgaagtgaaggatggttttggtctgccaatgccggtaagcctagacttcatgatggagaaaggaggtttcaaatgacggtttataagttctggtgtgaatgggatatcggtatcaatgagtgcctgtggcgagactactaccagatggaagaagatgtagctaaagccttgtcagattgcgggattgatgatactattgaggaactggaggacgcaggcctgctcggcttcgactctgttaaagttatcggctaattaggtaataggagggcatatggctgagtttttccttggggcggcccttgcaggcttgttctttatgtttagtatcactgcgagctttaccgccgaagatattgagaaagtgacttcaacatgcgagaataacgaaggcgtcaagtatttcggagttgacttcttcggagacggtgctgtacactgcaacagcggcgctattttcaaaatcgaccgcaaatctaaataatcgaaaaggagatataaaatgactgatttcaacatcacccctgagcaaatggaagaagcaatggcaggtatgaaccctgagcagcgggctctggtagagaaagccttgaccgaccgtaaatctctggaagattccatcgtgaccgaggacggtgaactggactatggcatgcttgcacgacacatccgcaccagcttgggtgatctgcctctggtaatgggtggccctgacttcctgaagctgatgatcttggttgctgcgatgccggagaccaaagacgatctcctgactctgcacatgaacctgtccttcattctggactgcattcgtgaatcgattagcgacgaggagtaacaagtggccgaagagattgtaaaagaagacctatctgtcgacgatctcatggttgactcagcagggctagatgccctgctggccttcctagagagtcagtttaaaggtccgaagggtgtactgaagggatatgtcactatgagagtgatgtgcgctaagatcgagagtcttgacgggtttcaagagttgaaagatatggaggtgaactttgagtaacgatatcatcaacgttcatgctgggcaaccgatttctctggtgcaacggtcaaagaatcctatcaatattcaatattgggacgccgataccatcccttacggaacagtcttggttgttaccgagaaaaggggtgatatacgaaagggagaattggtcgtaaggctggctagtagtgcagatgatgagcactctgttaaggtatgtagattctctgatttcttcctcctaatggagaggggttatgacgcagccagtctcggcgacgttaaacaagcgtatgatgttctgttcgaagatcacccagtgactacctttgttaactgggatcgggctcagcctttgacaaacagtgagcgctactacggagactttctgattggcggcgaccctaaagggatgccactattcaacatggctgttcttaaaaatgttctgtcgccttacactgccgacgatgaggaactttcagctatgtctgggaatcccgagacagtagagcacaaagaagttgacgaactaagtgagagggacgaggctttagccgaggtcgacagactcaatgaagagcttgttgcactgggtaagaaggttgtgttcgccaacctagaagattacctaggcaaagaaaactatgccacattggaagctatggctaaccacaaggaggctgtaggtagcggaggctcctctagttactacactgtcaaggtgaacaaccccactacgaaggctaacatgccgtattttgcagagtgcaacgatatcatcgaagcgctggatatgcgattcggtcaaggcaacatgttcaaagcgttgtggcgggctgcggcagcacagaacctaggcaagctgaaggccggtaacgatgttatccgggactacgagaaagtcatcttcttcgctcagttggagatcgataagattctcagagaaaggggttgacattctccccgaggcttgcgataataggctccaagttgaaacgaaggaggtgtgtagatatgatccagaaactaaaacagaagctcatgatggtgcatcctatcctcgctagcgagatcgtctggtgcctcaccttcgcaatgcttcagtaaaacaagggagcttcggctccctttattgtatcaaagatttaataaggagagtttatgcaaatttctgcaaaagtgattcaacacagttcccggatcggcctaggtacgaagaatcacagattcatcactacattcgaactggagtatcctcggtttattcacagtgaacttatgactcaccgactttttagtcgaaatgctgcaagtagtcgtgccattcccgttgcccatatgatccgacaggtggaagagaatcctgcgatgcctgttcactggggaatgaatcaaccgggtatgcaagctgagttcgaactgagtgagtgtttgcaacgtagctctcagtacctgtggaagaaggctgcaaagagtgcggctcggatcgctagcgcactaaataaaatgggactccacaagcaggtggttaaccgtctccttgagccgttccagatgatgaagaccgttgttacagccacggaactagataacttcttctacctgcgttgccataaagacgcacaaccggagatcaaggttctcgctgagaaaatgtatgaggctcttattaaagcgggcccggcagaggctctatatgacggagagtggcatgttccttatgtgactcggttccgcataggggatggtaagctgcgttacgcagattgtaacgggcaagaactgagcgtagaggatgctattaaggtatctgctagctgctgtgctcaggttagctataggaagaacgacgagactctggagaaagctcttgtaatctacaaccgattggtagatactaagcccgttcacgctagcccgttcgaacaccaagcaacaccgatgctccgcatctcggacaatcaaactggatgggaggacggtgtgacgcacttggaccaatatggtgacctctggtctggtaacttccgaggtttcatccaacatcgtcaactaattaaagggcacgtatgtaatgagtactacggccaagaagaggaaggagtttaaaaatggcagaatataacctgagtctggaagacctcatgctggtcgatggcttcaaagaggcgttccagagtaacaatgagaaggtagtaagggagcatctgtggactaacggcatggatgttaaaaactactcgtatgaaatggttttctgtcagcatcgcaccctgattggccgagtcgtagagggtctacgattctctggctttgagcgtacagacaaggagtggctgagcctcggttgcgcctctctggaagctcatattgcagcgtgtgatgatagtaatctacggttcactcttcgtaagatgcgaccagagggatcgacagaggcaacgttccacaattaatgcagtaggagtagatatggaagttacaaaggctctcgtagatgaggccgatattttcaataagatcacacaaatcaggactccaacggagtcctatgcccggaaatatccggtcattgtcgaactagcaaaccagcaactagaagagaagttgtggttctctagcgaaatgaaggtagagctggataagttgaacctgaagtttaagttggaacctcatcagcttcacgctgtaaagactgtccttcaactgttcctcaaatacgaactgatcgtaggcgaggagttttggatgggtaaagtagtccgaacgttccctcgcccagaggttaaactagcggcttcgatcctgtgcatgatggaattggcagtccacgctgaattctacaaccagatcaacgtagtgctggggatggatacagatgccgactacgtggcgtacaaggatgacccggagcttatgggacgtatggagtggcttgagtctgtgctaggcgacgaagacgatgttctttcggtaattatcttcagcctaacagagaccgcccttctgttcagttccttcgctatcttgaagagtttccagtgcaacgggtacaacgatatccctgtgatcgcacgcggggctaaccagagtgctgtggatgaagacttgcacggtgtagtttcggctgagatcatcaaccaatactacgcagagattggtcgaccattgtctgaagatactcggcgtgtcgagaagattcgacaagctatcgaccatgtatatgctcatgaatgtcgtattgtcgatatggcgatcccgggcggagaacttaacggcgagtcggctgaaaactataaagcgtttgttcgttatcgtttgaacgtatggtgccgtcgtctgggtctggaagatcatttcgagaacgatgacactccgatcaaagattggttcgaaatgaacacgtacgcttacaaaatgattgacttctttactccgggaatgggcatggagtacgaactggggtgggatgaagaggaactagcaaaggcttgggaagaggagctgaaatatgagtaagagagacacattcaactattccgaagctaggaaaaacagtcaagcagcaggagagactcctctgtggtatacgacggctggctaccagttgttcatgaagaaatattcaaatgagggagagtctgttcgctctcgttttgagactgtagccagagctatggctcagcacgcccctacggtgtatcctgagtggtgggaggaggacgaatacactagaggcaaggactgggaacaggtattcttcgacgttatgtgggacggttttgtaagcccatccactccgcttctgtcgaacggtgggctccgcaagaagggcactacggtatcctgtgcaggcgggttgatggacaacaacctctatgaccgttacaatgtaatgacggagattgcagtgctaacgaagcatagtcacggcacaagcttcagcctgaccaactggccatccgaaggcgatgccattcgtggcggagagtcacagggtgttatgcctgtcattcgtgacgttatcaacgtcatggaagaggtcgcacagggttctcgtcgtggtagctgtgcctacagcattaacccccgccacggggacttctggaacgttatcgatcacctgtacaagcgtacagaatcgaacaacgtcggatggttgctggacgacaattggtgcaaggctatggccgagaaagaccctgaaacgctgaaacgatggaagcggatgatgttcgttaagctggcaagaggcaagggctacttcacgttcattgacaagatgaaccggcacctcgcagagccgttcaagcgagcaggtctgaaggtagaggcatctaatctttgccaagaaactgtgcttccagctaatgacttctacacattcagttgcgtgatcctaaactataacctcgaactctaccgttcttggcctgagcatctagtgttcatcgggcaggttatgtcggattgcaacatcagcgagtacctcgcaaccatggacgaagttagcattcaggaccgaagggctctggagaagatttaccggttcaccaaggacttccgagcacttggtagtggggttctaggattccatactctgctccagcgggaacgattcccggtcggcagtatggacgctatgttcctgaacaacgccatcttcaaagggatgaaggagcaagcggaagcttgtaacagttggctagctgaggttctaggggagccagagggctgccgtggactagggaagcgtaatgccactacaatgatgatgccgccaactaaatcgacggcagaactcatggctggggcttctgagggcatcggactggacgttgctatgtgcttcaccaagcagagcgctggaggtgaattcttccgtgtcaacaaggtgttgctggagattatccaagagcgaggccttgattgggaagagtgtgcaaggcagatcaacgaacgcaagggaagtgttcagcacgtagactggctaaccgatcatgaaaaggctgtattccgtactgcctttgaggtgagaatggaagactacctacgactgtgttcccagcggcagaagtacatcgaccaagggcagagcatcaacctttatttcacgtcgaatgactcgccggcttacatttcgtacatccatcgtctcgccatggaagacccgaacatcctatctctgtactacatctacagtatgagaggagcgggagatatctccagaacagaagaatgtgaaatgtgcatgtaaaatcattggcccggggcttgacagcttccgggcctttgtgtattctgagcacatcaaaacaaggagggactaaaatgaacaaattctctgaagtgtactacacttggagcgcagcgtgctctcgtacaaatatcttgatagatatgggatggactgctacaatccgtcgagacttcactggcgggatcaaccctgtatgggttgtggagttcacgcgatgaacagcaaactccgcaaagagttcgataaatggtggggacaggacgagcaagaagaacttcgtaaatcctgtgccaaaggatgggcggaatatatctggatggctagtcgaagaaaagtgagtgttgagcttcccgcgccagaaggcggatttatcgacatccaaaagtacacaatcaatcgctgcaaagaagctatccgcgaaacaggactggaggtgttttaatgaaagaatattttaaaaagcgactaatgcagaccagtgaaccgttcgattcagcgacgcaagctatggacgtagcgattgcgtggggaggggctaagtactgcgaattcacttgcgtaactgcggataatcgcgtcatcagcatctgggagtacaatgacgtagagcctgataaaccggtattcaatggacagcaacgaatcttagttccaacttttgaggaggtagtataatggaacaaactattgataaatctcggtatattgtgcttgataacgaaggtcggcacgttctgaccttgtgcgagaaggccgcctataacctgcttaaaggcgttcagtggacaaaggacaagcatggtcaaatccatgtaaatggtgtcacaggcgttgaactcggagttcgtcaagggattatcgctgaagtattcctgtatccgggctacatcatcctagaagaggtagactaatggatatgttcgataaatacatgcaagttatgtatgaccgggacgctttctcaaggcgagtcggtgagttagaaaaagaggtagccgaactcaaggctaaggtggctatcgctaagtgtgatatgcgtgtcgtgaaaaccctactggaagatatccaatgggtgtatcaagacgaagctatctatactctaccgggctacgtttgcccttgttgcggggaatctgcaaactatgggcatttccaaggcagcttcgataagagcccctgcctactagcttgtgtactgagccggagtgaagcatatgaagcctaatgttgtagactcgctaggcattaacatgtgctacgcctgcggaggtaaactgtacgtccgaggagtatgcactatctactgccctgactgcgagaaggcagagaaagataaaccgttcgtcaggatgcagcttctacaggatatcgcagacagtaagaggcttgacacagaataatattctttgtaagataagcccatcacagacaaggaggagccgagaatggccactacagagaaaattattgagtacgtcgaggtgtgcatatatcgcttgcaggaggacgtgatggcctattctaagggcttcagggacagagccttgtctaatcggacaggctacattcacggcctgattaccatggctgaaatgaatgagcaagtgagtatcgaagactgcgacaagctccgagctaatctgcgggacgcttctgaagcagtgatgaacacattggacttttaaagtcaactaggaggaagttatgataaaagattttgtaaaactcgttggcttgtctgccgtagcctgccttctgcttgtatgtattataggcatgtttgttacagttctgcacagtggggcagagattgttcaatctcagatggaacagaaagacattatcgtgtctaccgatgacggcaccatcaatctcggtcgctccgtgaagagcgagaagctgctgtacagcatgtgcatcaaggtggaagaccgtaagccagcttgcgaattcaccaccaaggataaggtagtacatgaagtgcggcaggtgatgcgcccgggcgaggctactgcacgtgacattaagattgcagttaacgcagcagtgacgtatactggagagaatggtcagaaggctacctccctgatccctccgaaaggtgaattcctgccggcaggtactccgtcagaggtgcatatcgaaacgattgaccgcttgttcgacagcgtgtataatgactacaagcaaaacttcagcaagatgtgaggaggactcatgaaagcacagcctaaagaagtagagaccctatctttcgacaagcgacccaaggccggggatatcgttcgactgcggtccgatggcaaggcttacgaagtgtgtgctgtgtatccgacagcggtaggctgggaggcggcgcttcgaagcgtgtacgacaaaaccaagactgtcactgtcggcatggagtggtgaaatgtccgcgactaacaagtgcgtcaacttcctccctgtcactccggacgggcgagtgatcgtccggttcggtaaaaagaggttaggatggctcggtaaagagggtaaaaagtggtattattacccttatggatgcgaaggcaggatcaaatccgaaggcttcaaaactctgatcgatattaaggcgtggattaaaaaccccgactcggtttggcccgggcccctagcttgagattgactaataagccgacgaatggtacaatgggatgtaggaaattccctactcagtataaggaaactagcaatgactagccgctggaaagaggccgtgtatcgcaagtactcggtacgtcgtctgcggcaggaactcgaagagttcaaagaagctagacgctttgcaccaaatcaacgcatccgtgcatggtttgatgctcatatcgaatttctagaacgccacttggctattcgagagtccggccaagcctacccagacgaccttctgtaattaagtgttgtaggtagagattcaaatcatggttagtggcaaggacgccacactttcagcccgcccacaaggcgggcttctttttgcctgcaattcagggttgacttggagtaccagagcatgtagacttaccccgtccaacacaaggaggaataaatatgaaattcaatatctcaagacagttatgggtggctaaaagccaacggaagggcgattacaagggaacgcccttggcgtacatggctcaagtagacttcaacaaggacggaagcttggcttctagcttcaagaagaagcagcagacaggtgagggctgggcaggaaagagcgctgagacgtgcttcgtagataatgtcccggtaacggggcacttcatcggcgacagcgtggagcgctgggtgaccgagaacaagtacttccgtgtaacggacccgcgaggtttcgttctggaagtcccgaccgggaacatctctaccctgctattcaactgcactgtagtcaagggagtcattcaagagccttgtgtgtgggttcggatgggttctcagcacgttctactgccggaaggttcctctctctacaaagaggctgtaagcttcgtggagcggaaagagtcagccaagaccgttaaagatatggttgcaggggatcgatgcaccctccttagtaacggtacagaggcgaaggcggaggccatctacctcggacgggtgaaactcacttggcaccttctggctcaaaagggccggtactctaaccgtggacgtggcgggtgggcttatcgctggggttaccaccatctggagcgggagttagatagaaaagaattcaccgagaaagattccaagtgggttagtgtgtttgctaagaaactgagtctcggtggacgatggaccctcgacttcgttctatcgccgaaggccactgatattcagtctgggacagttccagaggaacttgagaatctggacttggtagatggtgtaatgtgggagtatgacggagaggatacccgcccaatggcctactactattctgtacctgatagggtagtcaagtgtatcaacgtagacgaccccgcatgggacgctcgatcctacgatgaggtaaggtggactaaagagtggactgtagtgggtgccgagtggcgaaaataagccaccattattttagaattgcccggcgagagccgggctttttcatggcaggggttattttcaaattatttttagatttctgggagtttcggccaatatgggcaatatgaaatttctcaggaaaaggctcagaatgctcgtataagagccgttcgagtgtaggtatggtgagctactacttagccgtagaaggacagtgtaacgcttaataggagggttagaatgaagattgacaacggtggcgaatatgcgtattggctggcggatatcaaagagtttgtttctcagatggatgccacagagatcgagaagagggcttgtatagcatacttaattagctggtatcagcgaagagtactgcacagaattaaacgggaggaatacgaggagatctaagctagggaccggatggatttttagggactggatagattttcacagactgcaaaattgagaactgggcagatttttaggaactggacagtttttcacagaaggggatttttctacagaggaatttcccctgaaatttagccggatttctcagaagggcggatcgttagcaggctatctaattggttagcaagctacctttaatcgttagcacactaactaaaaattcctaggacggacctcagttggcacgaacgttgcaagcccgcaccagtttcccgggcaggcgtaggcctcgactatccgtcgtgaaggcgatatgtagttggggactcgcaccccgcgtttaagatgtgcccattctactatgacagacagctttgtcaacattctttttatggcataggctttgcaattgcaattaacatgccaacacaaatatcaggctcctccggtgtttatctccggtgctcggcttccagcctgcgttgcccgcatgcctactattatacacaagctatcaagagaagcaagaaaaattatagagaaaaatctacacaaaggaggttgacaggcctcctttatatatgcacaatgatctcacattcaacggaacgtcaggtaagcatcatgctacatagtgaagcccgggagatggccctacaagagatgggcaagtggagtctcctcgaacaaggttggaaattcagtttcaatctcaggatgaaacggacgctgggacgctgtaatcatactaagaagctcatagaacttagctacgggtatgtagctgctaatgggctcccggcaatattggatactatccggcatgaaatagcccacgctaaggcgggaccggatcagggccacggatttgtatggaaagagtggtgcggcttgattggcgctaaacctcagcagtacgccagcacaaaagaaaaagtagtcaatttcccgtggcaactggcgattcagcacgactccgggcacttagagcggctcaatcactacggtttcagacggaccaacatggcgaaaaagcaggtacgcgggcgtcctgagacaaagggcagactagtttgggtgaagagtgaaaataagggttgacagcttaggccattcgcgtagaatggccctcaagcaaagggaaacaccctgagcaatcacgaaggataagtagatatgaaagcgctttgtaatcatcgggcactctacgcagcttacagccgtagcgagattgatcgcgttgcggtagacctgaaccgttactttcctatcgagaaagatgatgaatgggaagatggaccgtacatgtaccgccgccggacctatctggtgaagcattcgaagggcatagcaaggtggcacagtctctattgcaatgggaccgtccaaggcgttggcgtaatcttcgacgtaaagtcgggcgaacctttccgcacagcataaggagattcagaaaatgcaagcttgggatgtgtatcagaacggccaattgatcgatactgttttcttcgatatcatgtgtgatgccgaagaggtgcggaaatcgctggtcaatcacgacggatactcgtctgatactactgtagaggaggttgagtaatggatagtctatctgttaaaatcgttctgtcggaactgagctacaaggctctgattcaagccttcgccttgcttggccgaacgctcgacctagacgaggggttggacgatatacttaatcttattgcggatgagatcgctttccgcgacggcctgccgcctttcgcagacgactgcgataaaacagaatggatgctccgtcgatgggaatcgctcccggtggtatcgtacaatatcgggcaggacggaccgattgtcgctcggtctatcgaagtaaaaacggcatgaggggagaactgatgaccgtcagagtaggagatatcgtggctatccggggcgacattcggaaaaagctcgacggaacatgccaatacacgcccgaacaattggtaggtggtaaattcctcaagcatgccggcacgggagaaatatggactggccgagtgagtaagatacaaggtgatatggccaaggtgggaggggcttggcgcgggatcgaattctatgtgctcattagtgaaataaacgcttgacaacctgacccactagctgcaaaatagcactcacagacaacgaagacgccgataggcgaggagaaagcagatgcaaatgtttttcaaaacccgcacccaagcccgtgcaatggccaccaacggtcgcaaagtggtagacaacggggctcaagctgaaaagcgctgggctgtcaagctgaacaaaaaggaggcgaaataatggctaagtctgtcagtgtagatcgcaagcgttccatcctcgacgaggcgaaagacggtagctttttcagtgtggaattcgtcaaggcagacggcaccgttcgaaagatgacgtgcaagcgccagattaaatcggcgtatgctaacggacagtatgccactcgcaaaccgaccagcgctggcaagccgcacctgtataccgctgctgaggtgctgaacatggaagagggtaaatccgctttccgtacgatcaatctcgaaacccttatccgtgcgaaggtgaacggaatcgagtataaattcgattaaaagcttgacagcctaggccattcctgtagaatggccctcaagcaagacaaacttaaacagaaaggagattaaaatggcacgttctatcaaggcttccgacttcgattccgcttaccagttcgaggccgccaaacgttccgaacgtaaagagtcccgcaaatcgcgtgacaatcgcaaagctagccgaggccgagctttcgacttcagtagcgatatgtaaggtttgtgccctgccggcaggcttaaatgccggcaatcctaagcccattcgtcgagtggttttaggattctcaaccccagcggagataccaaaaatggttcgtcaatgcgtaccctgtcccgatgctcgccatgctttttgccttgcatggttgttcgccatgccggagttcgccggtctgcccgctcaaaaggacataaaactctttaagacttcgggacaatgggcggtatgttatggctagacgacagcggctcccgtcgtgggttcaagaccagaccgaggatgaaacgccgctgagggacaggatagacccctaccttagcaagcttggcgaagtcgataagctagagggacaattgcgacgggtcagggatgcaacggacccggacgaatacaacgaaatggctaaggtactaaaagcccgacgccggaagataatgaagcaacgtgcccgggcctacggtctgccagaggatgagcctaccaatgtccaagggtacagcgtaccggaagaggttcaccgtagagccatcctgttaagcagtgtaaaaccttggatgttctggaccatcctgtctttctcgatttttgtgtggtttgttttgaaaaacagttgacaaggttcccgcctcctgtagaatggtcagcaagaaaggcggacaggccgcctagctagataaaggataaccgtcatgcacttcgttcttaacctcgtttccaaaaacagcaaaaccggtcccatgcctgttagcacgtctcataacggcacctgcccggatgcctgccctctcaaggctaaaggctgctatgccgcttatgggcctactgctattcactggaaaaagctaagcaagggtgaacgtggcgtagagtggaaagagttccttaagcaagtgcggtctatctcccgtggggatttgtggcgtcataatcaagctggcgatctcgtgggtcaggatgacgttatcgatgggatcgccctgatggaactggtgaaggctaacaaaggtcgtcgcggcttcacctacacacattacccgatgaacaatttcatgaaccgccagcacgtattgtcggccaatcgtagcgggtttactatcaacctgtcgggcaacaatgtagcgcacgccgatgaactggccgacctgaacatcgcccctgtagtgactattctcccgatggacgcggagaatgtaagctttacgccgaaaggacgtaaagtggtagcttgtccggctgagaaaagcgacaaggtgaattgtaagtcgtgcggcttgtgccaagtggccgaccgggagtatattatcggcttccgtgcccacggcacagcaaagaaaactgtcgatctcattgctaagggttaacacaatggacgaatctgtttacgcaccattcaatcagtgtaagatgatgggcctagaacgaaccgtgcggagcctagcggctcctaacgggtgcaaggtagtcttgtatcaggaccataagaacaagcatagaatcgtcatatacgatgccttagggcatggaatgtctggggtcatggtgcaagcggatggggaaattcactacaaggaaactcgcaaggctagccaagggcagaatctgacaaggcagctacaagctcagctaaccgcatggggagtgaagtggttcccctctcagtatcagacagcggcgggcgcggcctgctacaaaggaggcgagtgatgcggcagcttaacaaatcccagcttaaggccttggggcctaagatcgacctagccttagagctagcttctactggccgtggtggtctaatgaatggccacggctctacctgctacattgcaaacaaagccgggcataacattctgcgggttagctaccataactcccgattcgttgcatatggtgctgagagtgtccgggtgactgggaatgtcattgcagcatgggtggaatggaagggcattaaccgggctgcaatcaacgctctgagtgagtacgggtatcatcctaacctgagcatagggcacaacgatgctcttaagactctgcgtgatatcgagcgttaccagtgacggcctcttactcgacagagaaacggggccagaggtgggccatcatccgtactgagcccggttacagaggtgaccgggtgaccgtgctaggattctgtatcaatcaaacgcacgctcttaaaacggtagccaaattccgggcttggcaagcgctaggctggccctacacactgaaagatgacagaaaataaatgcttgacagcctaggccattccagtagaatggccctcaagcaaagggaatcaccctaagcaatcactaaaggcaggaacaatgaaaaccacagagcaacggcaagcaatactccccggggccgccggcagtcaagcgacgggcgcctactacccgatttactgggatgaccggggctacttcataggcccgatgcgtcactggaaaatttacaatcgctgcgtctgaagcatcaagccatgcttctaataaccaaccatctggagactcaaaatgaaagctgtagcccagttcaaaagtgaagactacgaaagcggtgatagccgtactgctaccgtctatgaggatgtttatggatgctacgtcgtgagcgttttcggaactagcttgagcgaacctgtcagctaccattggggtccgttcgagtataaagaatctgcaatcgatgccgctaagtctgctatctaactgaaaaggggccacagaatgaaaatctccgctattctgaaaaataacctgaagttttacaagaataattcgttcatgtgcgctctggcgttcgataatgtgtccagaaataaagctaccgaggtgcaagaatttatccatcagctactagggcccttcgttaccttgcacgctaagctcaagaaagagataccgggttacgaaagagccgtatatgatgatgagccagaggatgaaatgactttctttgtatcggatagggcctatcaaatgcgttgcttgtggtgggaaactgtaatcgaacaactagaggaacaagggcaatgactcaagctaactggagcaaaggcgtccgggttgtcggcggaaagcgggatggtgagattaccctgttcacaagcgcacacttcagtgaatcgctaggcttatgcgagggtgatccttatctggtagaggctttgccgatgcccgccgcgctccggctgctagtcaaatggaacaagctgtgcagccgaatgaagcttgactatcggtatgaactgctgtagtctgcaatctcaatcaaaacaggaatgctccaatgtcgattctagccttaaccctgaccctttgctctgccgttcaatgtgatgattacattatcgatcactcactcccgggacaagccgcagagtgtaatgctcggctggtggaggaggccgaggagtggggcgatgcttgggtatcaactaacgctgatgcccgactgacccgctaccttagccggttcaatattcaagttgaccctcgctttgttttcgactacgattttacctgccaactcatcgcagaggatgaactaccatgaacgcgccccatctttccctcaagcagtaccgtcaacgtgccgctgtcatcgtccgccgagtgaaatactatgaaaggcgctggctccggaccgtagagtttttctcaggtgctgccgctcagaacatcgcagaacgctttgcctacgctgggcatgctgaagagcaaatgaccaagctcaaggctgagtttgcagccttcccggtggaggtgaggctagatgctctaggttggatcaattggaatactcacaatgacggcctgctagaggagtggattcatcaggaaaccgaccgagccatcatgctcgaatatgacgaaaccacgtggcgtcctgtagcttgctgggaaaccactgtcgatgctcttcccaagctggcaatgctgtaaaatatcgcccgttaggctgaaataatgcttgacgggcgtttttgtacctgtagaataggcctcaagaaaggaaaacagccgaaaggctcaatctgaaacccggagatcgataaaatgctgctagttcatggaaccactgcaaaaggcctgaaagctatcatgaaccgtcgaggcaaggagggattggccgcaccttgggacgtttcggaccatgacggaatgtcctacttttacaacgtaggcaagatggagtggcacgacgaagaggagtatgctaaggcagaatgcatcgttcgttgcctagaacaggcccaattgcagcaggctatgatggccgaaggaggtaaaatctatgctctggtggttgacattcccgaagagtttcaggattgcgtagaggatgattattcgtgccctaacgctagccaccaagctagctgttttccagaggataattttgatccggcatggattgtagaagtgtatgaggcagatgtgagtgtatgggccatccctttcatcgtagccggagtctcaggtaattctatgttccaatcccaccaactacctgacaaactggtggcgatagcggagtcggtggcgcggtccagtgacatagacacatacgaagctttcgagatcgaccattcacaggtggagctatctattctcgaaaatttcaaagataacgcttgacagtctagccaactagcgtagaatgcctagccaaggggtgcataagcgccccacctcgaaaggatacagaaaatggccatcgttgatcgaaccgcaggtaatgaaagcccgaatcactgctacatcgttactggcagcattggaccagagtttgagccgaccctgttcactacccatgcgctggcaaagaagtatgcccagcagatagtgaaatacggtaaagcaaacgacgttttcccgccttttacgcctgttatcgagacccggcacaaggcagatatgaatcggttcactgttcacaacaaaatccccgaataggagacgtatctatgaaactttctgaaattttccaaaaaggcctgaactatgcaattgagtacggaatgccgtggtatatgtgcatccgtctccgggagattcatttgttcccctcgcccgttgaaatggcagttaactcggtcatgatgtctgccggtatctcatcaaccccagagggatgcgaattcgccggcgttgatgactatttcgaggaaagcggcctagcagccgcatacaaaatgaacaatcaggaaatgtccgaatacgggcgctcatcctacgcaatgtgggtgcaattttggttcttcgtaatctttgacttagcccgaaaagggcagtagaatgcattacaagcgtagaacagccagcaaataatgtgatctagagggacggtcatgggtgacaaaactgtagtttatcgggtggagtgcaggaacggcgagggaccgtatgttaactatggtatggagattgatacgtcctccactcccgagcggcccgtaccggagcatgacgggatacctgatgttcgccattttgagtatttcgccttcacgtctcctaaacaactagatgactggttcggggactactacagcaatctgaccgagcactccagcgcctcaatcaaaatgtatgaggtggacaggcagcatgtaaggactggtctccggcagtgtgtattccgcagagatgcggcggtttgcgtcaaggaaatgactattgaccaatgggtaggcctgcttaaggctggcatgatctctgcggtagtcgtacaagctctggccccgatcccagccgaacaactatccctagacctaggggacgatccggcctgtgaggctcagaaagaaattttgaaaatgttcagtttatagggttgacagcttgggccattcgcgtagaatggccctcaagcaagacaaaccacaaacccggagactcaccatgaacaagccaatgaatactttcgcatacgcccactacgtcgcccgcatggacaaggcctctggcactagcctgccctacgccaccctgttccgcatcgccctgcgtaacgcctaccgcaagccgggtgtccgccagtacgattgtgcagcactcgtcgaggatatcaaagcgcgtgaactggtccaaaagcgcattcgggctgaaaaagcagtagtgatggcggcagtaatgcgtgcaattcgtaccggcttcaccgttagcgtgaaagatggcagcgatggcgagtgggtagtgaaaaagtctaccgatatcaaggaaatctctgatagcctgcaatctaccgacgaggatatcatccgcttccgcaagggcgacggcccggacaacatcgtcggctctatgtgggcaatctacggtaacagcgccggcgaagtgatcgccgactggactgataatgccaccatggccatgattatggctccggctgagcggaagatggaaaaatacgctgaattaggtatctaatgcttgacggggcccgaaaagggccccataatgcacccataccagcaaacaacatcaggaccgccccgatgagccagatcaaaatccaagagtatatcgtagccgagatcaaggttaaccattgcgctcacctgcgcaagggccagaccatccaagcccgcgatgctcgtagcagtgaaaagtggattgcattcatggtggaacgcgggtatagtgcctctgaagccgctatcctgttcaaagatgcacatgatgtggcaatgctcgaactggcagcctgaaaaaatcctactaggagtactgacaaatgaaacgccaatatactgattcctaccagtgcaaagcaatcgacggcctgatgtctatctgcggtggtaagaaagctatcgtacaagtgtggccgtccttgaaagcctctcgaaaccgccggctgaaaaagatggtaaaatacattgcccggtcaggatggaaaccgtaaccaactgattatcacagccccggcttgccggggctcacaataggagataaaagcatgaataccctgattatccgtttggattccgcctacagcgttcaaactgtccgtagtttccttatggaagctgtagagagtattcgaaagcatatccgggactacgcggttcatgacgaatacgattcgggattgagcccggtagcacccaatcatcgacttgcaatcgtcaccttagacgaagattgccgagtgtttcacattcaatgcgagtcacctgatctttatctggcgaaccctcggatcgtgtttactgatgttgaaagcccggcatataccactcccgtgaacgagatcgaagagtatagttacatgaccgcatggcagcatatacgtcaaaaagatatgacagcaaaagactacctgtcggattggtctatccttttcgcctcaaaggagaatgccattgatatcgacctgcgccccaatctgaaaacgcaaatcttgcattaactgagggagctaggatgaagcttcgaaccatattcgaaacctacgattgccgagttaggtttgtcaccataaccggcgtgtttgtggaatctcaaattgtgcggagtttcggtcaagctcaggagattgtatcactcctctgcaatcccgcagatactggtatccgtctatccttcttcgacgaagaggagggctgcgagtcgatcctctgccgattcaactacaaaggagaaatcatcaaatgaataacaagtataaggataacatcattgcggaatactgccatttcgacggcagacggccagtcctttccttggcggcacgatgggtccaccacgacagtcgagttgtgaagctggcagcgctctttgcctgtgctggctatggccgtccttacaaagattgtattaaggcctacaaggacgccaagcagcgggaaaaggatatgcgaaaccctgccaaatggaagctgagccgagcgactaagcgggctctacgggctcgactagtggctatagaaaaactagaataatccggaaaatacctgttgacgtgaggctagagggttccctatactgtgcctatcgagacgcacaaggcgtctcctaagctagaaggactagcaaaatggcaaaggcaaatctgaagttctcccgcattggcaatgacggctacgactacgcccgcagggaagacggggtttggtttgtcagagaagggtactacgggcggtacggctgggctaaaaccaaatggactcaagttcaacccggggatggcatgactatagtcgatgcctgcctgaaggctcacgaagctggaagctccagcacatacatcggattcgggaatctggtggtattttccgacgggaaggggctccgtttaccctgaacaggaactcaaataaagttgttgacagcttaggccattcctgtagaatggccctcaagcaaagggaatcaccctgagcacctgaataggtaaaagacgatgcaagcaacctaccaagccctgaaaactctgcgcgatgcttgtgaagctgtcaaggatgaaaaaggcaccatcaacggaaacaaattgaatgcactgcgtaacaaggctgtcaaggaaatgcaagctggtggtgaaacctactctgacgccattagcatggctcacgacttgattaagaagtatcgcaagtaatcaatccgtaacaagccccgggtgaccggggcctctcataggagagaccatgaaaaacgttcaaatctgttgttcgaagtgtggagccatcaacggcggtaacagcaaacacaattgggttatcgcattaggcaagaagtggtgcggtcattgtgggtccaatctcacaacccttcgtcgctaaccattcactgagacctaatcgaggagagatcatgaacgccactctggcacgcctacagaacgaacgctgtgcaaccctccgcctgatgctgctgccggaacatcgtgggtatcagttctctggccatccttgggccgagcgcatccgcaatctccacgatgaagccaagtgcatccgcagccatcactaaaccgcactaatccattaaaactctaacagcccgccttgtgcgggctttgttctatctgcgaaagcgacagctttcaagtgtaattaacatgtaatgttgtaacactctgtagaggtaacaccagcatgacaagatagaccacttgtaacgttgacgttacatgtataacagcatgacagcgaaagctgtacagatagcattctgtccagttcacccctatcaaataaccccacaataacccacctaaaacctatcggttttaagcggcctgtaaggccgtatatgaagcgatagcttcgctatgttagtctgcaccatcaaggcgagagccttacagcatgaggcttgtaggaggttttaaggccatatgcgattagcataggatgttggttgttttaggtagatttttggtataacccctttcagcgctaccattgtcccggtgatgttaagcgacagcttacatccgctcccattttgcaatggaaattgcatacagttcatcatgcgcttcaaaagtgacttcactttgcatgcggatgcatgctatagtataccctgtgatagctccgctatcccgttttgcatggcacacgaattgcataagcatgacaagggtaaccctcgaaagcggagctttcaaagtgtaggctgagtgtgggctctacctctattatatttgcgaccggaagtagtgacactgaaaacgttgactctagcccagtaaatacgttaaactaaaaggttgatagctgccgctatcgagtaaccaacattcacacaaggaggcacaatgacaagcaacaatcatgccaagattcacatccattacgctaagcaaatctactacgccatgcgtaaacgtgccatcgcaagcgatgagatatgcaaggaatgggccaagcccaagacaggctttgaagcgttctatgattgggtggtgaatgtgtcagggtacgccgtaggctaccgcctagacaggaatatcctcttcccgggaaacaagctctatgctccgcatacatgtgagttcacacctacatacatgcatactctattcaccaactgcgacaagacaagcaataaccgtgccaacaatgatctacctctaggcgtccgcctagcccgtcatgacaagtacggaatgccagtatacgtctcacagtgcaggacactaggcaagcagtctacccttggatcgttcgacgatccgatgcaagcccatgcggcatggcaacatgccaaggtagcagccatcctcgaatgtattgatctctatcagatggaggatgttcacagtgtaaacgttgttcaagcgttgcttgaaagagtggacaaacttggcaaggatattgcacagggaaaagagacaacccttttgcaatgatttgatggggtcgatggtcaaccctctgagagtgcgagaactccgccagagtaatccgatagcgaagctatcaaacgtatatgcatattccatgccaacatgtggaaagatttcacccggcagggcgggagcccgttggcattagttttgcatagcttagctgtcgctaagaaggaaagaccacggccacccattattttggatttactaaggg

SEQ ID NO: 64 - DNA, 94871 bp, synthetic construct
  source 1..94871: mol_type = other DNA
gcttacatccgctcccattttgcaatggaaattgcatacagttcatcatgcgcttcaaaagtgacttcactttgcatgcggatgcatgctatagtataccctgtgatagctccgctatcccgttttgcatggcacacgaattgcataagcatgacaagggtaaccctcgaaagcggagctttcaaagtgtaggctgagtgtgggctctacctctattatatttgcgaccggaagtagtgacactgaaaacgttgactctagcccagtaaatacgttaaactaaaaggttgatagctgccgctatcgagtaaccaacattcacacaaggaggcacaatgacaagcaacaatcatgccaagattcacatccattacgctaagcaaatctactacgccatgcgtaaacgtgccatcgcaagcgatgagatatgcaaggaatgggccaagcccaagacaggctttgaagcgttctatgattgggtggtgaatgtgtcagggtacgccgtaggctaccgcctagacaggaatatcctcttcccgggaaacaagctctatgctccgcatacatgtgagttcacacctacatacatgcatactctattcaccaactgcgacaagacaagcaataaccgtgccaacaatgatctacctctaggcgtccgcctagcccgtcatgacaagtacggaatgccagtatacgtctcacagtgcaggacactaggcaagcagtctacccttggatcgttcgacgatccgatgcaagcccatgcggcatggcaacatgccaaggtagcagccatcctcgaatgtattgatctctatcagatggaggatgttcacagtgtaaacgttgttcaagcgttgcttgaaagagtggacaaacttggcaaggatattgcacagggaaaagagacaacccttttgcaatgatttgatggggtcgatggtcaaccctctgagagtgcgagaactccgccagagtaatccgatagcgaagctatcaaacgtatatgcatattccatgccaacatgtggaaagatttcacccggcagggcgggagcccgttggcattagttttgcatagcttagctgtcgctaagaaggaaagaccacggccacccattattttggatttactaagggttagggtagcgaggtgggttcgtggttaagtagctcggaaataaatccataactggcagaaggcgaaccagcagagggcaggcccgctccctccattattttcccagcagtagaggaggcacactctacaaacgtatcactctattcggcgggggtttaggattcgaatatacctttagcggctaaatgccatcattgcttatttcctattttcgtgctataatccttataggatgttcttattcttcattatagctggataagcgatggttgtatagattcaccacaaatagaaggaatatagaatggaagataatattcaagctccgcttgcagctagtgcaggtggcaaattcgcaactgtatacgaagctattgtcgcactcggagtagaaggggctgccgctgtgtacagggtaggtgtagggaatagattgacaacagctagaccatcggcgtggtaaagagaagccccgggcagcgaaagctgatcccggggctttttattgccttgagtttatgtatgaagagattccagttgtctctgctcttccatatactccctagtggcgtagttcatcatgaggttgcaatactcttcgtttatctggtccatgtattgcaacactttctccatgctctggcatggactaaatccattatgacggagaatcttgcttagattaccctcattccagaagtctctggcccaagcctccaaagctactgcgtagaggcttttgatgcacccgataggggatggataccaatattgctcagacattagaccctccaaacgcagcaaacaccccttgcttagctaggatagtctttagctcctccagtgaaatggtctcgtctcctacgaccacatacttgtctgccttccctagagtcatcacacacttagtctggaaggtaggccgatacaagtcatacacatcgggttgccacttgcttcgcaggccagttccgtagctaatgaaccggtcttcgggatgatcccggatgtataggcaccggggactatcatctggcccatctacggagatagggtgttccatccactccctgatcttatcaacgacgccctctcctaccttcaattgagcgtactgacagtactcaaggaacgcatcaaactgttcggcagtgaaattgctgacatcgatctctttagttttcattctcttcctccatgtctgcaatgatttccttcaacgcttgaagcgtgtaggtgccatttagctctgtagtaggaccagtgtcacactcatgaagcgtgtacgcggtcactttcttctcagtgacgaaatggaagtctacccttcggaagtcgtaggtcgatttcgagtatccaatggcctctttgagttcttcctcgtaccacaggaatgtcattggacttccgtcgcttttacgagtgtagtccagcagattatctccaacccacagtagcacttgagccttgtcgtacatgaagccgtttccgctcccaaactcgataccataagccttaaggtgctgttgtactgcaatgttctcttcgggggtcttcacaatagtgtaaaacttcaccaaacgctctttcaatttcagtcctcctgtctgtgttttatgggagtgtaaaacgttcccagtccattgtcaagccttctgtggtgatagtctgttccagacgctctctagctccttttagaatgatatcccactcatctccttcttggacccctacatacttctccatcatcagcgcacgatcaacaagcccagctctgtagttctgtcgctcttttctacgcgatagcactcttgagatatggtccttcttcttcgccaacacgctgatagctttccttgccataagagttgcatactcgctctcctcggcggtcatccattcctgatacagcagccctagacgagtgtcatgctgtacgagtggaaggtctttccatatgatacctactcgtccagtatcagagacggctttccattccagcgtagtgccgccggtcttatagtcggtgatctttacattctccgagttagattgagactggaaagcgtgcctccagtctcggtatacagtccaccgtttccagtcgaagaatgtctcacagatggctttaacaggttctccgattttaccctccagttctttcaggcggttctcctgctcagcactcatgtatttgataggtcgggaggctggatcgtagcactcctctacctgaaactcctcagcccgagactccaacactttaggctcatcgttactttcttcctctcggaaccatgcgaacagcttcttaaacatattcagtcctcctctcctgtgatagctaccctagtcagtctccacacttttctaggtagactaacgaggaatagcatagccataaacggtacggcgataggccagaatattccagctaacaccgctcgggcctctttcttacgcctctccgtactttctcccctccacccaagaaggggtcgtagagattcccatacgaacatccctatcacagagtagaacaataggcagaccactccgacgactatgcatactagaatgagaagccctacttgttccatggtgcgatcctcttaagtagtttacggctgttccagatagacagagcccacttaggtaacaacaccactttcaaaacgctgtatgttgcgtagagtagcagaaagctagcatacactgtgaatgtaataggccatagcagtcccagtacaatggcaaaagcctcgataccctctctgtgatctttagtcgcactagctgggaagttatctttgaaatactccgtgatacccatgtaggtccacatgaacgcaattccccacgcgagcgcgaggacgaatagcattgggattatctccattactcccctccttttcgaatcaagtcgaagtaggcccacacgtagaagttgcaccacgctctgcctatggcccagccttcccaatagtcttcccagtccttgttcggagggttattctcgaacatggataacacgcatgaatcagctacttcgtccaagaggtgcattaccgaattaagcggcccgattccaaaggtcttatctagccaccccttaaatcgtcccacgtctgagacggtgacgctggagtcactgcacagtgccaatctctccagaatgtagcacatgtaaggctcttcttcgttctcgaagaatgcccgcatgccttccttgattagtggtgcaatactattagagttcattttccctcctttcggatcaggtcgaaataagaccagacataaaagttcatccagttcgtctcagtgtctcttagacaattgcgatgaagataagagataactgattcccacgacgtaatcccgtgctgctctattagccactctctgaatgaccgatactctccgtgggtgatttgcccttcttctactaggtcactcaggatataacacatatatgtgtcccgggcgtttaccgagtaatcttccagtccgatctttatcaactctgcaactgatctcattgtttcctcctctgagagccccactagggctctaaatttttggttcgacctgcggtcagcacatcacaacccagttgtacaggtcggcctcctcataagctgatgggtagcgattgtactccaagaagaacgcgtggtcaatagctgagtatttggttgcgaaactcgtaatgtaagtcagaaacccgttgtcctctttcctgaacagggcgtattcttcagtaccgtccttaaacgtatctagcgagatagtatacttgtcgaagatcacagcatttcctcccggctaatgtagtagttgtagttgtcctcttggacgaggaacgcacgatagaagcctttctcaaagtctcccttgaccagcaccagattgccctccaccttgcatgtatagatatacatggtgtttgctactcggataacaggatcatccccgggacgaacatccagagcagagagcatagcctccattggcatgcttgtcaagtgtgcaactacagccgagcagtattctgcatcgcggccagaagtgtcctctgcataagcaggagcgaccccgcacgaatgcagggcgagtgtaaacgcaatagctacgagtttcttgaacatactaaccctcctcttggtctgtctggggaacatccggctttgggtagacgaatgtctctggatacttcatgcatcttagctcatctttgcagaacccgtcaatcaatttctcatgtgcgaattccgcagccttgtagtagcgattagcctgtcttgcctccactcgaaggaggtggcttatcgtgtgagcgttgatattactaagacttgcaaaaattgtcaagagcttttttgcagaaagaggaatcgacctttcatcgggtctgtaccagtccagccgggcaactccttggagaacgtcgtctacccacaacgggtagtctccgtctagctcgaccatgacttcgtacatttcaggctgaacagcgttgaaaaagaaagagggctttcgccctctgctggtatctagaggaggaacaagccccctctccaccttgtgaatcaaccgatcagcattcgcccctatccgagactttagctcctcgatctcttcacatgtcaacatacggagggcacaccttagatttctcgatagtgaacacgccttcgcatgtcaggttagcaggtccataccacttgaacatgttgttgatatcgtatcgaatcaactggcggaacttctgcccgtcgcacatatccacgtcgaaccacgccacgacccatctgacgtaatcttcagggtcgttctcttctcgccatctgcactctagatcaacgtgactgggctctagaacgtaaatgtcttcgaaccctgtactctggttgttcttaagtcggatgattcgagcgcgaatccattgcatgcacctgcggtttgggtctgtgatatcgcagactaccggaacctctggaacctcaactgtatacatgattgtacctctatttgttttacaagaacgccatgattctgtctctgtctgcatggcggtacagattgaagcaaggcacgcctctagaggacgccagttgccaagcggtcctagtcccgccttctggaatcccgttgtggtctgtcttgctccagcacaccaagaacttgctaggcgtgttgagatcgattcccagcacttggaaaacgttccgagtgtgggctcgtcttgcgaacgggcttagaacggacctcccgtcatttctgacagagttccaagccggatgaatttgactggcaatgcctttagcttcttcccattcagccggcaactcttcctctggcaggatggtagctccgagcgtctccgttatctggtactggttgaagccgggagacggaagatagatttctgccgtagttcctcccttgttattggatatataatccagccagcccgattcgaacgctgagtccgctcccttcgctcctcctgaccgaagaataaaaccttgttctgccagtttacggcctacctctcgaaggatgccccactctctgtttggcgtatccctacttccgactcctgtgtaatacttcataagatcaccatttcggatagctcttctggtgttacccattgatgccggtattctccgttcttcgggttagaatattccaatagaacagggtaatactcgtctcggtaatcggtgtctataacctcgcagttccaacctacagggataggacaagaacgccccttgggggccatcttagttccaatagacaacctgccttgactagccgcctcattgacgcttatcaggctgtatctgtgttttaacgcttcaactaccttgacttggaggtctaaaagttcctcgattgtaaagtggcttacatcgattgtcatattactccctcccttccagtttcttgaattctttgtccagcttagctagatgcttatccaacttgtctagctttttatcctgataaagctggaaagcctccgagcccggggccaaccaagtccccttatacttaattgcaccccggatcatatctcctcctattacagttcgtaaacgtatacctgaaactggccgagcgtctcctcgataagaggctcgacattgctccagtcctctccggctaaaccgcagccaatcttcggcagacctacacacaactccgaggtaggaatcgcccgagcgtcagcctctgcctcaaggaacagagacatagtgtacagggcttggcccagtgcgtcaagctgagtgtagactcgtccctcttctcggccatagttgtactgcccgtacagattgtaaatcgatccatactcgttaattgtgaaggtgagggagccgagtttgcctcgatcccctttcaccgttgcttggtctgcctcgtaggcctccgggaattgctcccggatttgcttagcaatgccgctgcccatggtgttgaagcaattagcctgatgtgcaatagcgtgcaactctttgtttttgaacgcggcgagcaggtcgccctttcggtatttaatcatttgaacctctctacacttgtgaatctgacttcagagcctctcgctccgtgagcaatgtccgcgtacattgagttaatggcagcaaacggggaccaatactccttctcccagattttgaacttgaacattttgtgccctttattttctgggcgaccttgttcgcagaaggttgtaaagtaatatttagctaacacctttatcctccttatactccgttcttaatccgataacggatagatgccaagtcattgttcttcaggtcttcggtgtcccatttcccgtctttgaagaacgtccgcaaggaaccagtagcctcctcctcttcagatacattatctttcaactggaggaatcgcccattttgcaggtctcggtacactttcaggaggcctttagccgacttcttcttgctgtcagttttcgggtctttgaagattgcaatgccttcaccgttcacttccgtgtaggtagctttcactgcgaatccgaaagtatcccgggtgttgcactggtaagtgtaactgccaactccaaacactacgttcagggaagcgaaacctttctccttcaagcgctccaagattttagctgctcggcgagttgtaatggaatctccatagatcaaaccgatatgagaatcgagcatcttatagcctgcttcgttcacagtaccgccgaaggtttcccacagaacttggatagctcctttcacctgcgcctcgctcacttcttcaagtttatagccaattacatactcgtattgatcccactcagtgggaataaccttgaagtacttatcttcaaagttcagaacaaatgcatcgtttccatttactgcatccatgatatcccagtgttcgagcgactcgacaacttcaatatcacccagtccgcagataacctctacaggatcaccagagtctggacgaacaaccagcttgccgtcacgttccatgatctgatccttgatggacggcagaatgtcagtaagcacgccccagaagtcgaagctgtctgccacgtaagacagaataccactcgggaacttacccatcagttcaacaaggaatcgacgttctgcttcctcacggccacctttaccttctccatccttcatttctttctcaatgcggaggatgttactagtagctacagcgtgttcagtcgcaggaacggagcaagctaccaaaccagtcgcgttatagtagtcctcagcataaatagctgctgccaatgtgtccgaacctacgaacgaggtcaagtgaccaacaccactacgggctgcgtcttcgatcccgctcataccccgggcactgaagtcgtggaactgaacggacagcaggaagtcgtcatagcatccagtgtgattcgcgtagtatcggcccatagctgcgtattctgcggcgatagtggcgttagtcgcggtcttccaagtcatagcagaaatcagtgtttcgtggtagttcactagccagtagaactccggcagggtgttcttgatggtgagaacaggcacgcccatcggtacactgacgccttcagtcagagacttgacctccagaggcagatagccgagcttgtgtagggctcgaagctgctccacagcctccatttcccggccaaaatagccagtcaggaaccgggcataccggccaacggcgttctcttcttcagccgcgaagaagccttcccaagactctacgatctccatccaagcggcccgtccgccgacccacttgagagtgccgtcgtagaagtcggtggcatgcgtctttcgataaatcttatcggagcgaggggtcaggttgctatagacaagctgagtcccttccgagtacatggaaccgtgtccaatcttataaccatcggtggaaagatgtggcagaattttcatgttatttcctcctgttgtgttgaataggcccagactacatcaatctgggcctcctgtcaatattcgacttcttctactggcagcgtcagcacagggtagatgcatggaaggcgcagcaatggttgcttcttgctgtggaagtcttcccaaaacttatcgtgcatcgtcttgtaccgagcgtccagttcctccttggtgtcgaactcctccaccttgacaaccctcttctctggagccgaacgcttatactctacaatccagatactcaagctcacaggcgttccgccttggagtattcaaccggaatgacagtcagcgcttcgtgctctttttgagggagcgtatccgaggtgtagatgcatccgaaggaatccagcaagcagtcgatacccttactgaagattccatgagtgacgaacaggtcagggagcactttactgtactctcttagggccttagacacgcttcggaatgtagcacctccgtcacagatatcgtcgatcaccagaagcggaagttcaggatcgatatccgaaggattcagaatttcaaagccttcgattttaccggtctggagatcgcgcttcttattgcaacgaattacagcggctgctccggccttctttgcaaaatcctcggtccgctttgttgctccgatatcaggggctacgagttgatattgctcccactctgaacggctcagtaggccaccgaagaccgaagattgacggacaacttcgacgttgttaatcaggtgcagagttgcgtcgctgtgagggtccacaacgataactcggtcatatccggcagagttcagcatgtttgcaaacactttcaaactgaaggcgtcgcccggattgcaccgacggtcttggcgagcatacgggacataacccagcagaagagtcatgtgcggattaatcatttctgctcggatcgcctcggtgacgttgagaagagccatgatatcatcactattctgaatctgagctttaacgtttacgaacgcatggctttcgatgccgcccacattaacgcccacttcgccgcccgggaacgtccacacttttgcctcttgccacggacggctcataacaccttccatttcctgaaggcaacctacagcataactaatcatacatcctcctcacagtttcacagagaagcgattccgcattgcttccatcgtgctctcgggaacatcgtgtacagacttattcccatgacgattctctacaatcagagagataacagtgtagccaaactcttcagccatgtcaatgtatggtgctacctctcgctcccgggtactagtattggatacgataaccgcatctagtcctatctccatagaccgtcgcgctttgtccatgcactttttgtgagattcaactaccctctcagctttccacacatacttgccgaactccatttggtaatcgtccgcttcgcagatagacgcctgccggcctgactcccaagttttgttatacagaatctcggcaagagaggacttcccggagcccgggagtcctcgaatgatatacatgatcttttcttgcatacttcctcctttaaattcgagccatatcgaagtaggtttcgatcagaagtcgtcgctgtgcatcggtcatttctgagaaccgagcctcatccacttcatttaccaagaagtctaccagaggatagaactcttcgtcaagcgtctgcttgaatccagccgggtcttggtacatcgcattgaccttcttactacccatcctcatgataaacttcttgccgaggtagtgagttgacttgcacttcactgtccctagccctgtttgtaccatgtaaccttctttctcacaagaactcagaagaccctttgcatgttcccagctacactctatgtgctctggacgaagaatctttacagaactgtggtccgttacacctagggcgtgagagtcaagaatatattctgaaagctggcccccagtgaagatatcgcggataccgatcaaatatgccccttcttcttcctcgacaatgtgagggtcgtctggagagcatatctcgaagttatatgtgaagcctgcgatgtaatcatctgggttattcgacacatacttctgaccaagggcaacgtaatcgccggtcaatgaccccgtagtactgaagataagggagccattgtgcttagtcacggagaacatgaatccattcactttctcaatcagccgcacacggaatttaggatggaggaaactcccagcaccattctctcccagattaaacaccttctcgaaggggcgtacaatacaatcaccggagtgctggtcaaatacatgaccccgtgcctccagaagaagcgggtgcttgttccacaagttgtcgtagaataccttacgagcgtatttaataaccgacataccgttgaagtgcttaacagtcaccagcttattagcgatcaggtctttgtacatctcaatatggagtttaccttccatcctattcctccttattctacttctacaatcgggcagaatttagacttcttcgctttcaaatacgacaagaaaatcccatcctttttatcgggcctcttagacatcagtcgagcgagccgatagaagaccgatacaccatagaatacagccgctacggcaatccatataaaccccataatagccaaagtcccgcctagaatgtagccggtcgcgggtccaagtagcagtgcatacaggctggagcctataaccgatgcaaatgcgactgaactgagggctagccacactacaagaaagaccgtttgccagaaataagagcagagagtaacgctcttccatccgctggaaatgtccaagtaggtaggactttcgaatttacgatgcaggcgcatatgccacgaattcttattaatcttcatgcttgttcctccgggaagatgttgaaattgagtacgttgtgctcttcgagttcgaaagaagctaccatcttgtagcctccgagcttgtcaacgatctccagtatactctcgatagagaatttgtcaacatgctgcttcatcagattagagattcgactctgatgagtaccacatctctcagctacttcccgctgagtgaggcccgactgagaaatatagtgtgcagccactgccattacagcctttttgaaatcttgaactgggttgctcatgttaatcctccttattactcagtgtaatttttccgctaaagactcgaaactggctgatctcgaactggtcagtccagcgagcgtcttcgaaagccactccttcgaaagttccatcaaacttgacgtctgaagtcatcagtacaatgaaaggcacgccttcatcgtggatcagctctacaagagtattagccttgggtgtaataccgttttcttcacgtgaaatcaacacattaaccatattatcctctctgtccgtcatggtgatctactaccacaaattcttgattccgcatgtattctctcacttcatcgtaagagaatacctgatgatctgggtgattgtcaatacctacatcaagcctctttcctttggaaggcaagctgccgtgagtgtggccgtgtagatgccaagcaccatgatgagcagtattccacgtctcgaaagggtagtggcacatcacgatcttcactccgtcaattcgaatctccttgtactcacgaatgtcttctacgtgagagagattgctatcagcgatcaacttccacagacgagagtcgcaatggtttcccttcaggaaggtgatacggccattcaactgcttgatgatatccagcacaggctggagcttgttctttcctgcaaatgcgaagtctcccagatggtacacttcgtctacccgacctacccgggagttccaccgagaaataagctcctcagtttgctcctcgaaagtccaaggcctgttgcagtattcgatcacattcttatggaagaagtggagatcggaagagaaaaatacagacattatgcctccttttcaaattcataaatcttgttgatcctgcggatcagtcgaatagcagcccctcccagcagatgctctcgatccggtttcatatgggccattgccttgaactctgacagcatatctcggcgttcatagtggaagtctactacccagtaggtgtctgcattaatcttaccctctcggtacaggtgcccttcaacaccaagccagtggtctactgcgtctttcttcagtaactctttcggagaccacttgtctacaccccgcaacttctcgaagaaagagtaaggacgagaatagttgttgatggcttcctctacagccgactcagcctgcaatttaatgaactcccatcttgcaagaacttctttaatctcctcggtggtggctggggtgtagctgtactgctctttatattcattccacattatactgttctcctacgtagcctttgaatttgtcggaacgggttgtcttcttctgtgccttgttttccagaaccgatgcttccctttcgagcatgctcagttggttgctatacttcttgatccgtttcgcattgccactcattacagaatttgtaagattggcaatagtgtcgcagattttaacctcttttgcaaccggatgattacggcaaccctcgatatacttccgatagctttcagctcggtttttgtcaagaatgaccagagcctctacgatatgcggcatcacgcccatagactctaagtcctcctctgtcaggtcggtatcctcaagaacgtcatggaggaagcagaccgctagaagggtgtccatgtacggaaagtccgagaaggcctgattcgggtccatatccttcggagcattacgtgctacgcagattgtatgcacttggttcagatggtaggcatacggatagttggtctctccataccgctgaccttcatgggccgagagtgcgatctcgatagcaataccgagctgagttttcatgttaatctcctttgtagaatgtgtggttgcctatcttgatggtacgcttgtacttccgagcccaccgagggagcctgccattattggctctccttacctttctctcgttcaggtagtggtccgctcctcccgttggatcaacagtatacccatacagagcgttgtatgcaacatgttttgctgtctcccacttgtcgggctccttgacgccctgccgcatgctaccatcgcaggtgtacgaatattgacatttgaagtataacactccagctacggtgctgggccacctgtcgtgctgcatcctgttgatgacggtatgagctacagcaatctgcccgatttccggctctccacgggcttcgaagtagaccgcttctgccagcagtctgcaaggctttctgtactcgcacagtgttcgcttgctttctatgatttgagcgggactggcttggaactccactacaggctccgtgccgtattttagacgagagtattccatgtcgaggaacatcccaatgaaggctagaaggatcgacaaaacgagagcttctaaggtttccataacacctccttagacaaagaagcccgccttgtgggcgggctgtatatcactcggctattatacttcagcccaagttgtaacgacgggcgtagtctttgttggggaactcgaccatcatcgactgaatgtgaatgttgcctttacgatccttctggattttggcatttttcacaatcttacaggcctgcgccttagccataagctcagggcttacaaccagatcgatgaaccctgcactccgatacccgcatccggcaggggcccagaagccgtgctgggtcatcgtcgagccgggaacgaggtacaggttgtgcagacgcacagcagtgttgaaactcagcttgctgatatgcttcgcttcccgagtttgggtttcaaaacacccagtcgtgtagttgaatttgtaagtgagagcatccatgaactgaatgacgcttcgaatctggatagcagaagtatccaagagctggaactcctcagccgcgtcgattgcagtggtcacgttgacagacttagcgttgaacattttatatcctccttattcttcagggacaaatacaccgccgattacccagccagcgcgaattagtttaccagttgggaactgagcacgcaaggtctttttgaaacgactttgaatttgcacagttagccacttaccccggtagttctcaaaattagtgatctgatccttgcgttcgtcaaagtcaccgtacgtcacttcaagcagctcttgaggtacagggtcaaacaccaccagaacagcgttcccattcttgtctaccacgtagttcacgatctgcatttccatatcgaagaactctttgtacttctggagaccgctggagcgcttaccagattcgtacaagccctctgggctgcgccacatgataccctcataaccgttctgacggtacacgtcgtgaagacgtttgaggtcttcgaaagtggagcagaatacgtactcaacgaatcgaatactccccagatcactgtgtagtgcagactggaactggaagtctaccagacgctccttgaatgtcaagccttctttcacgatatcgaatacgtgaaattccagtcgctgccgcagtccgtaaataaacgatgtgctatctacttccttaaggagccgatcatactcctcctctccgtcttcaataggataggcgtccagagctttctcggccttcatccacttgtcgtaagcatcctcccgcttaaccgcagagttgatatcttccagcacctccccatggacgtacagttcgccgtcccacacatcaccctcttgcatgatctcttcgagttctttgatgatgtgcggtacattgtaaggtttacccatgcgagacgctagcgtaactacgccattggctttcttagccatgcaacgcaggccgtctagtttaggagagccatacccctctttgtatttagcgggatcaagcggttttgcgagcatagccataacagggagatcgttgagttcttccttggttgcacgataacccttgtccaactgcttgctcaccttggactgagcctcagacacggcctgctcctctacagagcgtttctgcttaccaactcggatgttggtaacctgagaggtcatggctccatgttctttgccgtatttcacgacgatattgaagctaccgtcttcctctccgaccacctctacagtccactccttgaacccgcctttcttgtcgagtccatacagtcgttgaaaataactcattgatcctcctcgtatttgatgacaagaacatcattctcccgtaggtgcctaagaccttcgtcgagccgatattcgtgcttatagtacactactttgatcccagcttcaaccaccgagatagcacaatttttacagcaagagtgagtgacgaacagggtagccccttgggcactctcagggctgcgtataagggccctcagtgcgttttcttcggcatgcctcacctctgccttggttactcccgtttcgtcctccagcggcccgtttaagtgctctggaagggcattatacccgcaactgatgatacggttacgttttactagaactgcaccaaccttggaacgagtcgagtcgctgcacttagcgaaggcctcagcggcctccatgtaagctttaatatgcttaaccttcacacctagcctccgccgacgaggacagcaatctcctcgtactcttcagtggatgcgaactccatgtaatagtcgtccgtatctgacaggtaaacaacgataggcggataataactccatacagggtctccgtgttcgatttcagctaccctcacattgccatacactgtgcgaagagtctgtagagcttcgatcacatcgtcaatacgcattacagttggttcagtcatacctgcctcctcagttttctactttacaaacggcatcgccgcgtcgaaggaacacttgcactgacggctttccgctccacttgtcccacgcttcagctttaacactgacagtcttaggattgatggcaaccacctcgcctaccagcataaccattccagttccgcctaggcagaatgctactgcgtcgccgatctcgatatcccttcctgctacgtccttcatttgtactctccatctacacccttgattaaaataacgaagtccgaggggtcatcactgccgtaggcctttgcccgaaactcctgctcgtatttattcaccgcctccggatcacttttaacctcaagctcttggtagaggtcttccataaaccaacccaagtccgtggtcgcagccgaagccgagaggtgaccaagaagtcctaccagcatattgatctcgtcgctctccaactccaacttgtgaccgttacgttttactactttcatatttcctcctatcgcttctgtccgcgacgagtggctacgccgtaagctggcttgctcccctcgcccgtgttgtgtttcttctgcactcggctggcattgacggtgtaacgccctttgccatactcttcatctatccacgcttgggccttagctcgctgagacgtgtggacaaagatgtagtagccagatgcatccttgataaaccaagtggccgggggctggaagtccagacgtgaaaactcttcatagtcgatcacagtcaccttctgcttagccactgtatactgccccactaccgactcttttgcaatgattttatcaatcatctgagttgaaagatcagagttcttcgaggtcaatttctacctcctttcctagtccagtatctgcaaagaagctatcgagactcagagcgtggtattgagacactttgtaaccaccactcttcagaaggctgtgagcggcctcctctactttgtcctctgtcagtctccagtccgcacctaggagtacttcagctaactgctctacactcggagggttcccaatccacagacccattctactgtcaggctcgtaatcttcttcccatacaagttcccacactaggttactcattggtacacctccttcttacgaatagaatacataacccactcgtcttttcctgtcttcccgcacggaatgtctacttcacactctgcgtttacaatcaggcccgctacgatgaaatcaagaagctcctcgtctggctctggtaagcccgggtaggacgatacaaccctgcggatagtctccgatttggtattgcccagtaccccaagcatgtggaggtcaaactctccactgtagtcgtcccagagttgtccaaatatcacccatacactattcatacctagtaatcctcctttagcttgttggtgtccattaggcagcctccttcttcttgtccagcaacttcaggcatcgtttgcaggtgatatgattgcggtagcgggagaagttcttctcctcgaagtcgccatcggtgccacagaagacgtcatatggttcttcactgtccgcttctgtgccgccgtcccactcgtcgtagtgaactgctcgcgtcgccattcacttcacctcgattccggcttgctggagggcttcgacgcactcatctcgataagcttgaaggtcttcgtcgaatatgactctcggcaggtccaccctcagagccgcgcggctggctttccatgcctgccacatcagcgagtagcggtgtgctgcttctataagagccacgtatacgtggacgttatcggtcttcacaggaaagtagtcggtgttacgccactcgacaccgccgggaatcgggaaacagttttcgaactcctctctcatactccgcaatcctcctgaatttctttaagaagctcagagggcataaccgacagagccagttcctccagagcatggatgtaatcctcgacatatttccattcctttctgatcttctgaaggtacacgccttctttgctgttgtcgatagcctgaccttccagctcctgcatcagttcgaacattttgtatatcctcctatggccgcaaaaatggccggcgactactgtcccggcctgatgatactactctgaaatttcttccattgcaagtcgtttcttttcaaagaaatcgctgagcttgtcttctagctcttcgccaccgatgtaaagctcttcccctgcctttacacgctctagctccttctcagtcaagaagtcactgtagacgtgatctacccatttatcgcaccacgctgagctaaacgctgcattcctcaggctattcctgaaatcagcagatacaacgccaaaagaaggcgcgtggatcatgaaatatgtgaactggtcgatctcaacggagtcgcaggctagcgcgatggcagtcatggcagacgcacactcaccttcgagacgagcatgcactggagcttgacactccttgatcgctcggattatagcgttggcggtctctacctgtccaccgcatccgttaatggtgatgtacacttcatcattctgacctgcattttcaagggtccaaagctcctctgtgagttcttcgaggctctttattacgtatggcagaaggatggagtaacgattgctaacactttgtgtacatgaaacaggcataatacctcctttacaaaaatgggcccgaaagggcccttattactgaatcactcctcgctttctttctggccagagcccagcattgcaaagaatggaaggaggattgtgctcagctctccgctgacagcttcaccaacttctgcaccagcctgagctacactcaggaactcttcagtgcgtacaaacttgtcaaccttaacgagggttttaaagtctactcgttccaagaacgcagcgccggctgcttccgccagaggttcgaggtttacgacttccatagcgcgatccagagcttcctgattgatctctaggccgttctgtgcggcaacctgcatcagggtagacttcacagtctggattgcgtagtctttgaaaaactcacgttgtgctttgttaaacttcattcacttttctcctttgtagtacgacgacggcgggtttttggtttatcttccgattcagtctcttggacttcctctacaggaacttccttagctacttctgtagccttttcctcagtctgcttctctgcaccttctcggaccatcttgacagacttgagagcgaaattcatgttagcgaagtgcgggtcttccacatcaattcggaagccttggtcaaaggcgttctgcatgcccatcagaagactgaaaacgtcccattcttgcacaatgacttcattgccgtcaagctctttttcgatttcctcagaaacgccttcctgacggaacatctggacttgacagagggtgccatacacaggatagccttcgatggagcggacgactcggaaaccttccttcatgtgggcgtgaatcgagcgaagccagacgatagggttgtattctacgatattgataacttgcatattctttttactccttgcgggttagtgttttacaataataccacgtttctcaggaatgtcaacccattttgttctggtagaggcttgacatagaggaaatctgtggtattatcaatattcagcgtgggagagatatgtctgaaagcactcaccggcccacgcctagcgcctatgaagaggaatccacaagggcaacctgaactcgaatgctgttaaagggtggagacgacgcgaaagcggaatgacagcaatccgatgcagcctacatgctgcccctcaccgaactcatctgcatgagtaagaggaattggatagagccaaggcacgtcttaggcagattaaattctgtatggcgagccttgggacgactctatccttccctagccgaatctatctgcatggggtgttctcctgatacacatacacaaatacccaccacagataatccatcaatcaacccataaggaatttctatgagatgtaagtgctgtgatagcgaactctcgtttgagactccagtcatcaataaacatactggtaaggaggacgatctctgctcctcttgccgtaggtttgctctcaatcctacactggatcatgagtattttggtggttggtatccaagcgaaggggttaccgctcctctccctaccggggactgacattgtatatagagtgcgcgtactctgacaatatgtataaatagtagattacggtgcgaataattctttaagggcttgacaacaggagatttcgtgctataatcggagtatatggggcttacaaagcttcagaggatttaatatgactcaagaaagaaacaagggcggtcgccctacgaatgccgagctagaagcccggggtatcattcagacagacctgaaagcagggcttagacttctaaagaagagctttgcagagaacatcagattcctccaagagcaatctgacaacccagaggtctctctacagatgagaatcaagctcaagaaagagctttctgacatgttcgtcgcttactacaaagctgacattgcactcaaaaaagagcttgcaaaaggaacagaatcaggagataatgagaactctgaagaggacaagactcccggagtcgttctcgcgttttgattaattgccgcttcgttcaatggtaggacgccagactttgaatctggagatgatggttcgatcccatcagcggctgccaaatgtagtaaaagaacattcacccgacaaggaatgtgtctcgctcagaggacagcgagtaataagtgtcctccagaattaagggtcggtgagcgtaattggcaacctactggattccaaatcctcgtattctctgttcgaatcggagtcggcccgccaaattagtgttgacaggagcaaagacctcttgtatagttacaccaactgctcgtatagtgtaatggacagcacaacggtcttctaagccgtaaggtctaggttcgaatcctagtatgagcgccaaattagatggacggaagctaaaggtgccacctgggtccttttctaccgttcgtatagcatacattatacgaagttatatcacgtgctataaaaataattataatttaaattttttaatataaatatataaattaaaaatagaaagtaaaaaaagaaattaaagaaaaaatagtttttgttttccgaagatgtaaaagactctagggggatcgccaacaaatactaccttttatcttgctcttcctgctctcaggtattaatgccgaattgtttcatcttgtctgtgtagaagaccacacacgaaaatcctgtgattttacattttacttatcgttaatcgaatgtatatctatttaatctgcttttcttgtctaataaatatatatgtaaagtacgctttttgttgaaattttttaaacctttgtttatttttttttcttcattccgtaactcttctaccttctttatttactttctaaaatccaaatacaaaacataaaaataaataaacacagagtaaattcccaaattattccatcattaaaagatacgaggcgcgtgtaagttacaggcaagcgatccataacttcgtatagcatacattatacgaacggtagtcctaagaaaccaccactgctcactgccaaaataagtgattttaagtgttgacaaactgaatttttcatgttttaatacacttatcagatgaagaaacaattagcgagtagccctgagtaggtcgggaactagtctagaaaactaggccactgcgatgagcggtgagggttcaactcctttactcgctgccaaattaaggccctgtggtggaattggtatacacatcagtcttagaaactgacgccgagaggattgagggttcaagtccctccggggccaccaaattaagaatctcttttgctatttggttagggttcgagtccctacccggcgactatggccggtctatggcggccaaatagtgagagagctaggggacatgacgaaggtagcgctgctttccgatctccccggcgctataaaagttatcatgaaggggttgacaaacaagaaattcatgataatataggtacatagagtaacaaacaatgtagccgggtagctcaattggtagagcacccgaccgataatcgggtggttgaaggttcaagtccttctctggctaccagaatttaaaggcccattagctcagtctggactagagcaagcccctgtctagggcaaggtcgtcggttcgaatccgacatgggtcgccaacaaggtcgttgtagagatagatggctactatcatccggctgtaacccggacgccataggctagaggttcaattccttccttcgaccaccaaatagcgagagcgttaagactggctggcgctgtcactcggctcataaccgaacacaagtggttcgattccacctctcgctaccaaattgcactccgaggaaccctaagtggtgggttcagtgtcgctacctatctcggtaaggggaagcgcctaagctggcacgggtaattgagtagctgtgataagctactggcagccagtataaatcgtccggctcgggcccgttatagctcctagatttgaattagatgctgtaagccataggaggtgatccagtatctcccggaggggcccgggttaacaacctcatgaatttagcccgcgttggccgagaggtttaggcggcggattgcaaatccgtctcacatcggttcaaatccgatacgcggctccaaagtttattgggatgtagctcagtggtagagcagggagctgttaactctcaggtcgcaggttcgagccctgccgtcccagccaatttccaaaagagactcttcgctttagaagcagagtcgaacgcccgatacgggccttattatctcctcgtagctcagtctggttagagtgtcggatttggaatccgaaggtcgaaggttcaaatccttccggggtgaccaatttaaagcgggtttcgtatagtctggttattattcttggcttccacccaagagactagggttcgaatccctaagcccgcaccaaaagtcgtagacctcagtaacccggagtaacgcccgggagaagatgtgagttctacgtatacgcgtctgaagctaactaggtagaagcaccgggttgaaattccggaggacttggatcgttaccaagcgggcgcaccaaacaatgcagttatagattaaatggataaatcgccagactttcaatctggtgttccgggttcgatccccggtaactgctccaatcaagtccaagccggaacattcctccgtatgtgctttcagccggcttggcattatcagtgtggagattgtgcagcccggatgctgccttccggttgtgacccggttgttggggttcgagtccccgcctccaaccaatgttgtggaattgaatcacaggacgacgactgggtgagattgagcgtcctctagcccgaaagggtgttcgcgcaaggcgaaccgaagccgaaaggctgaagtggtgcccggacccacaaccaatgttgtgtaatggaactattacgttgacgctgtgtgctctccggatcgtaagccggtaaagcgggaatagcgggctcccgtagcagagtagtagtgtggttcgattccacagcacgacacctttcctcctcgcctgtgctgaacggtttcctcctcctttcccgtctcacaggctctattccctgccctttaagcatttatggtgatgcaccggctttgtaacccggcgaattctgttcaagtcaggaatggggcaccaattcactatcaaagaacccgcaagctcccgatagggttcacactctataaggttgtagcatggaaaacactaaggttcctgataaaaaactcggaccaatcgcgctagcgcttaaagaggccagagagaatttcgatctcagccctcatgttattggtccaaaatctttcaaacagaaggagttcacagacagcgatgcaaagatcactgtattcggtggtgctgctggtgctggtaagtcttatctcggtgtaatggacttcatgaaatatatccatgatcctaacttccgaggtgtaatgactcgtcgtactactcctcagattaaaggcccgggcggtctgcttgaaaaagcaacagacctattcaagctcgttgaccctaaagtcaagtggaaagacaaagacggcaagtttgtgttctcttctggtgcagttattttccttcgacacttcgaacaagaatctgacaaagactccttccaaggttgggaggttagtaagttcctagtcgacgaaggtcagcagttcacagaaggcatggtgacataccttatctctcgtatgcgtaacccgaaatgctcggttgttccgcacatgaagattacatgtaaccctgattacaattcgttccttcgtaaatggattgaatggtggctagaccctgacacaggaatcccgatccctgagcgctccggcgtaactcgctggtttgtacgcaaaggcggtaagatgttctggggagacaccaaggaagagtgcattgcccttcatggtaatcccagtctagcgcctgacgatgaagatcaggtgaagcctatcagcttcaaattcatcgcggctaactgtttcgataacccaatcttgatgctcaacgaccctgagtatgtagctaaccttgaagcccttcctagggtagaacgtgaaaagctcctagacggtagctggcacgctagagaagagggagctggatacttcacaagggactggtgccaaatcgttccccatccgcctctacgggtgcttaaaagggtacgtgcatgggacatcagcggtagcattgaatccgaaaccaacagaaaccccgactggacagccggcgtgctgatgagccgtacaaaagaaggcttgttcactgtcgaggatgttgtcagagagcgtaggttgttcggaggtgttttcgacctcattctagaaacagccaagcaagacggtcaagacgttgaaattcaaatcccatgtgacccgggggctgctggtaaagcttatgctgcacagctaattagagacctagcggatcatggattccacgccagaccgaagacaactaacaaatcgaaagttactcgattcgccccgttcgtatctgtagctgaaactaaatcagtgcaagtcgttgcgggagattggaacgaagattacttcgatgaacttgagcgattcgacggaagtaaggctatcaaagatgaccaagttgacgctacatcagatgcatttaatgctctatcccttggcagcttgattatccctgatttcctaccgcctgatatgactcaatccaacaaattcaaactaaattaacggctaaggatttaaggtaaggaggtttatttatgcatccgtttgaccaagctgtggttaaggatcctaccgcaagctatgtagatgttaaagcacgtcgtacctttctgcagagcggtcagctggatgatcgtctgaaagcagcactgccgaaagaatacgactgcaccaccgaagcgaccccgaacccgcagcagggtgaaatggttatcccgcgtcgctacctgtctggtaaccacggtccggttaatccggactacgaaccagttgttaccctgtaccgcgacttcgaaaaaatctctgcgaccctgggtaacctgtacgttgcgaccggtaaaccagtgtatgcgacctgcctgctgaacatgctggacaaatgggcgaaagccgacgcgctgctcaactacgatccgaaatctcagagctggtatcaggttgaatggtctgcggcgaccgctgcattcgcgctgtctaccatgatggcggaaccgaacgttgacaccgcgcagcgtgaacgtgttgttaaatggctgaaccgcgttgcgcgtcaccagacctctttcccgggtggtgatacctcttgctgcaacaaccactcttactggcgtggtcaggaagccacgatcatcggtgttatctctaaagacgacgaactgttccgttggggtctgggtcgttacgttcaagcgatgggtctgatcaacgaagacggttcctttgttcacgaaatgacccgtcacgaacagtctctgcactaccagaattacgcgatgctgccgctgactatgattgcggaaaccgcctctcgtcagggtatcgacctctacgcctacaaagaaaacggtcgtgacatccactctgcgcgtaaattcgtttttgcggcggttaaaaacccggacctcatcaagaaatacgcgtctgaacctcaggacacccgtgcgttcaaaccgggtcgtggtgacctgaactggatcgaatatcagcgtgcgcgtttcggtttcgcggacgagctgggtttcatgaccgttccgatcttcgacccgcgtaccggtggctctggtacgctcctcgcgtataaaccacagggcgccgccgcacaagcaccggtgagttgataggaggcggcgatggccgagactgaaaagacagcaccgggtatcccgcgacttcgcctaggcgagattggtagtacaggccttaaacaagtcaatggtactattctggaagaacgccgaccagaacttcggttccctagggcatgcagaacattccaaatgatggcggaagaccctaccatcaaatcagcactcgatctcttcgaaatgatgatgagcagggttgactgggaagttgatctaggagttgaccccgacgaggctatgaaggcccggggtaaattcctgaaagagtgcatgcatgacatggaacacagttggtactccttcatcaaagaggtcactagcttctacacctacggattctccgtacatgaaatggtgtttaagcgacgtgaaggataccctgtatcgaagtacaatgacaacaaattcggtattaaaaagttgccaatccgctctcagtctactatcaccaaatggttgtactctgaagacggtagaaacttcctagggtgtgagcaaagtcttgccaatgttgtcaatggcgaccgttacgtcaacctaggtaataaggacggaactgtagagattccagctaagaagatgcttcttttccgggtcgatgctaaacgtgacagtcctgaaggtaacagccctctccgtgcgtgctataacgcttggagatatcgagtagagattgaagagcaagagtccgttggcgtaacacgcgatatgaacggtatgcctacgctctatctgcctcctcgatatatgtccgaagatgctacagaagctgagagggcagtctacgaatactacaagcgagtaattcgtaacattcaaatgaatgaacaatctggacttatccttcctcaagcgtttgacccagaaagccgacaacctctgttcaaattcgaactgacctcttcgcagggcagtaagatgtatgatacagatgccatcattcgtcgctgggacaacaaaattctgcaagccttgtttgccgatatgctgaagatgggtcaggaccaagttggctcttactctctagctggtgccaagactaacatcatggctatggcgattgaatcgcggctccgcgaaatcaaagacgtactagataataaactcattcctacgctgttcgcactgaacggtgattatagtccagacttgccgaagctgcaatacggcgagctagatgaaatcgatcttgaagagttctcgaaagggattcagagaatcggttctgtcggtggtcttgaacgtgaccgtgaggtttacaacaagattcgcaaagctctcaagattaagcctcgaccagacgacgagcctgttgatgtggataatatcatgggtggtcagtctcaagcaggtaaagctggagtaggtaatggtgcatcaacatccgcagccggtagagacaacgccgctgcaaataacgcataaggagacagaatgctgactcttgaaagtgttattgaagctctcagcaatgctttcggggctcccgccaaggcggaagaagccccggctgtagaggtcacaaagtccctagacaatgaaaagaggatggctttgtttgtcgttcttgagccccaagaaggcgactccacgactgacctacacgcagacacctactccgaagaggaagtagagaaagcttgcatcaacttcaatactcattgcaacgtagctaatatcttccacaagattgaaacacaggaagctgagattgtccagtccttcatcgctccatccgcattcacaactgacgacggaagagagatcaagaaaggtacatggctccagtggtggcacttccctgaaggctctgaagtagccgatgcactatgggaaggcgttaaatctggtgaattcacaggcgtctctatcggtgccagagctacagtcgaggatatcgaatgaccgtaaaagcaaaacgtaaactgaccgatatcaagtttgaacacgaaggtgctcatgtcgctctggtcagtaagctccaaggtggtgcagccaacgggcacactactctaatcacaaaagctaccaatggcgtaactgaagagcttatcgataaagctgctgaagttacagtcacaatgcagttccctgagttccttcgtaagttcttcgggatgtattatgaagatgccgaagttctctctgttgccatgggatatggcagaacggagtatccagaactagatcacaaagactggatcgaccagcgggtcgagtctatgtccattcttaagtcggtttataaatcggctgacctgaatcaagctctctccgagcttacccctgagcagaccctttcccttaaacaggatcaggaactgcttgaaaaggctctggaggtagtctccgagcaatccaatgaaaatccatccaaggagattaccaacatggaaactatcctgaaatcggcccacctagaagctctagctgacgctattgcagttgaaaaagctgctggtgtcgctgctgttgcagaagttcagaagcaactagacgccgctaatgtagagcttacagctcttcgtgaaattgtcaaggctgctgaggcagagaaaaccgctgctatcgctaaagcccgtaaagagcaactggctgaagtcctcccggctgaccaagtagaagatactttcaagtctctggaagttctggacgatcaagcttttgcacaaacagtaggaacgctccgcattcttaaagctgctgctgaccaaaatgacatgcttgtcgagaaaggtgtatcgggcgctggggaagaagacgactctgttgtcgccggtgttgccgctatcctgaaagctcgccacggctccaagtaatatctagccaatctagaggaattccaaatggctcaaaacattatcgcaaaagatcatcagcgtcttagcaactggctgaaagaagaacaaatgggccaccgtggcctgttctacactcgcgaaactctgcctgtcgctgacattgatgttaaaacaactggttctgtcctagacagcactggcaagctggtaactaaggctactatcgccgacgctacctacatcctaattaccgacctgcacgactatgccaacgctcagatgagccacgctgtcgtccttgctcgcggttttgccaagatcggctccaaggctgttatcttcggtgctgacgttgacgacgctgataaagctaccgtctttgaagctttcaaagccaagaacatcttcgccgttgaccagatcgaaggcgcattcgagaacgtcaccttcgcgtaagcgagggtcgttccagtaaataaacactaggagtaactttaaaatggctaacacccgttcctacctaaacgatggtcagttctacattgccgaccagactgaaaacctgcttatcatcccgaacacttggaccctcgtcgagaacatgggcgtcttcacaagtgaaggtgtgactcagaacactgtccagttcgaagagatcgaaactcgctacggtctggttaaggatgccatccgtggaactcgtcaccaagttgctagcgaccaacgtcgtcaactgcgtgccttcgcgattccgcacttcaaccaagacgactacatcactccagaagacattcaaggcaagcgcgctttcggtgctgaccgcgaagaaactctgaacgaggttcgtgctcgtaagctggaaaccatccgtcgcaactgggctaacaccgctgaagttgcttccgttagcgctatcgtaacaggtaagagctacgccccagccggaaccatcgagtacgactggtacgacctgatgggtaaaactcgtaaggttgtcggcttcgacctgaccaaccctaccgctgacgttatgggcaagaccgaagaaatcttcgtccatatgcaagacaacagccaagacggtctgatccgtggtgacttcgttgccctgtgctctcctgagttcttcactgccctgattaaccatccgagcatcaaagagttctacaaagcttaccaagctagtcctcaatactggcgtgaacgtctaaccgctcgcggtctggaccttcgcttccgtgagttctacttcggaaacattcacttcatcgaataccgtggcgttgacccgtacggcaaccgtctgatcccggctggcgatgcttacttcatcccaaccgacagcggtgacctgttcgctcgttacttcggcccgggcagcactttcgatgacctaggaactctgggtaaagaactgtacgctaccgagcgtatggctgaagaccgtcgttcgatcctgatcgaaaccgagtccaacttcatccacgttctacgtcgtccacagatgatcgttcgcggcactgtgaatgcgtaaagacttcagggaggcttcggcctccctttcgtcgtaggagggtaccaaaatggcttacactggtgatccagcaaacaaccctatcgaccgtctacgagagattgtaggggacgtgtgggagcctccgatgctttccgacgaaacctatcaatgggtgttggacaagaacgaaggcaacgaaagacgagccgcacttgaacttatgcgtatgatgctcttccgcctgacaaggggaatgagagaacgcacaggtgatatcgaagtatatggtgctgagtatttcaacaactacttgaaagctcttcagctcattctcaaagacccgaatattgcaatttctttggccgtgccatatgctggcggtatctccaaatcggatatgctggctaatgacctagaccccgacaacgtaacacgggaattctacatcggttttgcaagacgggagaagctttacaaccagtgcaaccccggtcctcaagaccttagcatggggtgtgattatcttggcaagcttcagttttaaaacagatcgccgtcgcctcacatccttgattaagagggtggaggctctagacggaacaacggtagaagttggtttcttccccgaggaccgatatggttctgaaaatggaaacctaccagttgcacaagttgcagcttacaacgaattcggtactactcgcaacccaacccggccattcatggctccaacctttgaagaattcacatctcaattccactacgcaagactaatgaagtccacgttcgagaacgtcctacgcgatggaaggcagacgaatactcttctgaagaaattgggtaaaatggttgcagagcagatgcaagttaacattgacgactatccgggctctaacagtccggcatgggcagcttacaaaggatttaacgatcctctattccatactggaaagatgcttgagtctgtcaagttccaaatccatcggaggcaataatgctctatcctaccttctccatgaccaacttcgtaaagctagatttgattagaagagggcagcccggagacgacggttttggaagacctacccctccagttgagacagtagtaacaatcacagctaacgttcaacctatcgaaaaatcgacagacactcgtatccttccagaggccgacagaagcaaggcttgcttcaaggtgtactccagaggcgaagagattcgacagttaaaggaaggcccgggagggtggagtgccgatagattcatgtgggaaggagagttgtatgaagttatgaaagtcatcaactattcgatgggaatcctaaaccattacaaagcaatttgtatgagagtagagaggaatagcacagcatgatccacacagagctagaaaactccctctatcttatggtcaaagagttgttccccgactggcgtgtaattcaagcttacacgaataatcaggaaccgcaaaccccttatctggctatcgacattaagaggctggatgaactgggaagggaaaatgtctccaatatgagcgatcccattagtccttcgcatggaactattcaagttcaacaggacttcgcagccaaagtcgtattcgaactgattggcaagtatggagagacagcaagtgtctctgacatggcaatggcgattactcgggcaatgcgtactccagcaggacacgccgcccaaagaaagtttaatctatcccttttcaaactccctagcacaagacgagttcctatgctaagagaaacagatatgtacatgttctatcaagttacatgtgaatttggattctctgttatagaaaccacaactcaagagtttgctgctggggctgatattcacggcgtttattacgacgctggtcgcccgggtcacattattgagtcccacatcgacataaacttcgaacactaataggagacaggaatgactgttcttactgatgtaattgacattcagatcagccgtgagactgctgctgtcgcacagacaaacttcaacgttcctctgttcatcgcttctcacacaaacttctcggaacgtgccagagtctacaacagcctgaaaggtgtcgctgaagacttcggagaatccgatccaacatatcttgccgctgttcgctacttcggtcaagctctcaagcctcgcagtctagttatcggacgcagacaagttccttctgctaccgtctctgtcagtgttgttcaggaaggacaaagctacgtccttaccgttaacggactacctgtcagctatgttagccagcaagacgacactgctactctgattgccacaggcctaaaggcagcttatgacgtaactccggtagccggcgtaaccgtcacagacaacgaagacggaactctaaccgtcgcttctaacgaagactggagcctgaaggtttcttctaacctgactatggctgctgctccctctactgaaggttggccggctgctatcacagcagttcaaggagaaaacgacgaatggtatgctctgagcattgacagccacgccgatgatgatatcatggcagtagctactcatatcgagggcaccaagaaagtgtttatcggagccactgctcaggctaacaccaagacttccgcagagaatgacattgcttctcgtctggttgctgccgggttccaacgtacggctctaatttaccatccaaacgctgacgctcaattccctgagtgtgcttgggtaggataccaactgcaagagcaaccgggtagcaacacatggacccataaagctctagctgccgtagatgcttaccgtctaaccccaaccgaatctaccaacctgaagaacaagaacgttaccacgttcgagcgcgttggtggtgtcaaccgtacattcggtggcgctatggccggtggtgaatggatcgacgtaatgattttcgtggactggctggaagcccgcatgaccgagcgtctgtggttccgtatggctaactccaagaaaatcccttacgacgccgttggtgcaacaattctggaatcggaaatcagagcccagcttaacgaaggaattcgtgttggtggtctggctgaagctccggctcctaaagtcttcgtacctgatgttctatccatgtctccgaacatgagagcacagcgtatctttgaaggcattgaatttgaagcccgtctggccggtgccattcacttcgttcacattcgtggaactgtgaccgtctaaggacggtccttcccataaggagattactaaatggctgttcaacgtctagcgacattctctccggctgatgttaccattgttattactcaccctgcaactggtgagagcatggttctcggcggattcagcgaagacagtatcgttaacattgaaagaaacgctgacacttacgtgatgtataccggagccgacaacacatcgactcgcgtctacaacgcctctaagtctgctaccctcactgttagccttcaacaaacttcgccttcgaacgacttcctgactgctctttacaactacgacgacgcccgtcgttcgtctgagggattgttcacaatccacgttaaagacaactctggtcgttccgactacttcagtgatgacgcctatgtcggtgttgttccgggttctaacttctcgaacagcatgcagacacgcgattgggttattcatgcacacaacctgcaaactctaatcggcggtaacgccaagctgagcccgggtgatgcggatactcttcgtaacctaggtgtcacactagaccagcgctggctgtaatatagcgcttatgccacatcgacggggagctgccttaacgggtggctccctttgttgtttctggaggatagaaattgattaccacctactcgccgcgtgacgtggttgtaactctcgctggtatccattccgtgacagggtacgcagagggagagtttatcagaattgtaaaagatattaagcctttcatcaagcacggttcgatggatggtgaaatcgcaagggtctacaacaaagaccaaggctggcgagtagagttgacaatcatgcagtcctcgccgaccaatgatatcctttcgatgctttacaacgtggacattgcaacccgaatgggaaaattcccactgatgattaaggacacgaagggttctacaagcttcctagctctgacagcatgggtggaagacctacctagggtatctttctctggacaactggagacccgcacttggattctagggtgctctgaggtcgccatgaacattggcggaaacgtcgatcaaagtttggtcgagcaagctatcctgctgggaagctctcttctgccagcccttacgcaattcggaggcttctaatggctaacacggtattgacatatagcccatctgatgttaaaattgtcctttgtgggtatgctctcactggtgtagtttctttcgaaatgtcttggctttcgagaccctacacaatggttcgaggaatcagagggcaccacacccgggtcttcaatagagacctttctgcgcagattagaatcgaggttcttcagacttcggtgtctaatgatgcattcttctcgctagtagagcaagaccgaagaacacaatccgcccgaatcaccttgtctgtcaaggatacccacggtagcaccatgatgagcacagacaacgcttatgtcaatggctaccctagcataacattcaccgatggaatcgagaacagggtctggactattgatgttctggactggaccgatggcacggtaggcggaaaccagcaagtcggcttcgacgtgtttggaactgttcaaggcgctcttagctacctcagataaataaggagtatttatgttcggaaaccaacgtactgtcatccacaatgggacagaatacactatcaaccttctgccagcaactcgcggtatcagcgtactgaagcagctaaccagcttgctgggtccatcccttgccaagtatcaagctgaccacgacttctctggagccatgaaagaactgttcgataacatcgacaaggttcctgttgagaatttgatccagaatctgatgctgacagttttcaaaggttcgatggcaatcaatttcgacaccgaattcgctggcaagtatgacctgctgtacgcactcacaaaagacgtgatcgagttcaacttcggctcggttttttctctaatcggtttcgcagaggcaccgacggtataaagaccggggatgggcagtccgagacttcagtcactactgatcgagttcagagtgatcggagggttagggaggcccaccagaagttctcgcagcattgggagatttatgtggctatcactcaccctctcaagctaacgacgtatggggaactgagtacagtcctcactacagaagatttgtacaacatccttgaggttatagacgttcacgatactatcactcaagtggcaaaagaacacgcagaggctgataagaaatgattacagaaaggattgcccagctaactggggaacttaaatttacagtcgattcccggcctctcactgcttttgacaagaagctcgctggggtcgaagcccggctaagagaattctccaagctgacgaacaagcggtttggagttaagctaactctagatacaaaaactctgagagaggagcttgccaaggcagccactcaaagggtagtcttgaagaacatcgcggtagatgctgccgctgttcgtcttatctctgagaagcttcaagaaagactgaatgcaacgccgatcaggttgaagtctgttaggctagaccttagcggtatccgagatcagaaaaacttcgtaaagacggctctcggccagaccaaggtcgatctaccggttgaactgggcttggctcaggctagccgtacgctgtatgaatggaagaagcgcacagagagtcgttttaaaattcatctgaatgcagacattagccgctctaaattgctccagaatgcacgaaacacactaagggatgtgcagggtaggctaaacggtcttgctgtcgctacgcctcaaattaggctgtctgtagaccgtgcccatcttcgtagagagattcaagatgttcttgagcaaatcagacgcgaagtgagaatccgcattgacctagagtcttccatccgaggaggtggtgcaggtggatcgagaggtactgccggccatatccgtcaaggtatgggaatggggattggtagcgagctagccgggtggggacgcgggtttattcccggccttggtggtgcgttcgctattatgcagcttaaccgtgctaaccaagaactgcaaggtcaacgtctggccatgcaagctgtcggtggtggagtacagggtggtcaagagctacaagccaccctccgcgatatctctcagcgtctcggtcttgacgatagagcaataggtagctcctatgttaagatgatggctgccggacaagcatccaacttcgacaaaacacaggttgatggcatcttccaatccatggctgaatatggacgagtgatgggtctggacggggaggctatgaaaggctccttccgtgccgtagagcagatgatgggtaaaggacagatcatgtccgaagaattgaaaggtcagttggccgaaagattccccgctgctgtagctctgatggctaagtctcaagacatgactatcgcagagctaatgaaaaccatggagaaaggggagcttaagagtgatgctctgatcccattcgccagaactctagcggaagaagctcgtaaaggtggcgctctggacgcggctatgcaaggtacagccgctcagcagggccgattccagttcggatggaaccgcactatcgaggccttcgcggctggaggattcgaccgaggaatgagcgacttcttcaagattgctgcccaaggcatgaaagaagcgcttcctctggtaactgcacttggtggcgggttcgaagctcttatgaggcctgtcaacgctctggtcggtattggaggggagcttggttcccagtgggagaacattgccaagcagttcaacatgaccggcacagggctgactcttaccacggctcaaaccctagccttgctgacccctatgggcaggttgatctctgctattagctggggtgcgttggcactggaagacttcattgtcttcttggaaggcggtgattcggtgttcggggacttcttgaacaacaacgtacaagctgccgagacattcgaaaagctagccagtgaatccagtgaactgaagaacaatctcgacggtatcttctctgttgtcccggggctagctgaagcgctcaaaggtctagagttcaatgaaatgctggtcagcacgatgagagaacttgctgccatcatggagttcttcaacagtgttgtagagagattcgcaatagccggcaagtacagggacgctaagattgctgaagccggaggagacagaagtactataatgtcgaacatcgacacgatgtacgctatgttcaatccggaagatgcaaaagacaaggccaccttcatcggtgacaggctagtagctcagaacattgacgcgatccagacagagactcatacccgtgcaacccagtccttgactccagaccagtttgggtatatgatgcaacgtggtcaagttagaaacgaaatggagggtgccctcaagaagagtgccattgacattagtttcaacctcaatgtttctggtatcgatgctcagggtaacgtcatgacaactgaagcgcaagagcgagtacgagagatcgttagtaacgttcttgaggaagaaatctccagagcttcggcaagttataaggaatcccaatgacaattgctatcaaaagagagaacggagacctaatctggttcgacgctgttacagagttcggaagacagtaccgtggctctgtgagttccaacccaatcgaaacgggaggaaaaatcacagaccacattactacagaaaacccagtcttcactcttacagccgtcgtatcagacgcagacttcaacttgaacaggcccgttatcaacgacaacgaggcccagacatacaagatcaacaacaaagagttcgtgaatacgcagccggtaaccatcccggctgttatctcaacctctagactagaccctagcagaatctttccagaagttatcactcagtttattcctcctgagattccttctgcaactgtcctccctcaaaagggtgataaagtcgcttatgatattgagcgccaactgatcgacatgcagcgtaatgctgaggtcttcagtttgctggacttccgagacggtatcatctgggatcaaatcgaaagatgcatcttcaccgacttgtctttcactgaaaacgccgagacaggtagcagccttcaacctcgtatgacaatcgaggctgtgacattcacagatactcgttatgtcgaggtgagggttaacaagggtagaaagaccgctaagaaagaaaagagagacaccaaagaaggtgataccggggctagcaatgctaccagccaagactctcctacattcaagcgtagtcaaatgaaagaggctcagattagaactcaggttgcgaggtagactaaatgagcacgacttatatcgacacacttcctctctaccaagaccggaagtacagatacgcagtagctatcgagggaatctcaagagtccttcaattctactggaatagccgctctcggcagtggcacatggatatattcgacgaggaacttaaccctatcctgacaggactggcggttgttcctcagtatccgatcatggcagactacgccatgcaacatataggtttcaatggctacttcctactgatgcctgtcaacctagaacaggtacagtataagcacgatgcaagtgacattgtaccacagtttttcgaactgctatacgtgaacgttgacttggaggatgacgtagagtgaaacaatatgacagagtgtataaactaacgctcggtaacactgaatccgggcaaggtgtagagattacaaacctccaccctgacggaagtttgaacagagagggacttcagttccggtttgatatctctaaaagttcagataacaagaagagcggaaactcggcgactgttgagatatacaatctgtctattgccactctgaacattcttgaaactgagtatctgacgtgccgactagaagttggttataaggaaatgggaacttctgttgtgcttgatggcaacgtggttgaaacttcgactagaaagagtggtaacgattatgtcactcagcttattctaggtgaaggatatacagcactaacagagaccaagctgaagggcacagtatctccgggcaaaactgtaaaggatgttatcgaagaaattcgtcttcaaatgccgggagtggacagaggagcttatacaggcctcaattgcaacaacccgatcatgtatggataccaactacgtggactggctaaagacgcactaaacagtgtgtgtgaagccaacaatattgaatggaacatcagtggaaacgttctaaacgtcacagacgttaacggcccaacaacgaagagtgttcaaatggctcctctcgtaaacagagagaccggcctgattgatatcccattctacgccagtgccagcggaacagcacagaagaaagaccagcggagacggaggggcgttcaattcaaatgccttctcaaccctgagctaactcccggggttcttgtccgggtagagtcggacagattgtcaggcactttcagaatcaacaacgtccgaatctcgggcggatacagagacaacgaatggtacactgaatgctggtgttccgatcttaaccaagaggatattgaccaatgaggagaacaggcctacaagagcttctgaacctgcactcgtccacagagggttcgaagcagtacactgccataccttgtgtggtattgcgcgttctggacgattttagacgcctatctgtcgatgttagaccagtggtcaacgacctgtacaaagacggcacatcggaagagcaaccagagattctatctgtccctgtcattatgccgggaacagctaacacacttatcagcttcccattgaatgttggggatacggtgttgtgtgtattctctcaaagaactatggacgtgtttaaaggctctgccactggacagccacacactccaaacgatcttcgtaagttcaacatggcggatgccattgccattcccgggctgttcaccttccctaggtcgatgaacgaccctgcaagacatagttggccacatgataccaaagaccttactattgcccacaacctgatgacgggacaagaggcggaagttaggatcaaagccaatggagatattctaatcaacagccgcaagactataagcattaatgctcaaaatgtcaacgtcaagtgtgcttcactcactgtcgatgcagcccatacaacatggaacgggaacattgcacatacaggtaactacgtgcagactggtggaacttctacattcaacggtattccattccacactcacaaacacggtggtgttatgccgggcggcggtgttactgctgtcccacaagcttaaaggagatcatatggacttgtttgtcaaccccgacacacatgacttggtttttataaatggtgaagctccagtcactcaacgaatggttgatattgttgctcagcgactaaagatcaaactgtacacattcctaggtgagtggttcttggatgataggatcggcatcccctacttcgagaggattcttggtaagtctaggagccttcccgctgttgacgcgatattccaatctgagattatgagagaccccggcgtccttgagattacatcttggcagtcggggatcgaccctcacacacgtgaatactccatggagttcacagtcagaaccacagacaatacagaatcccttcccatcactttcagaatgataggagtttaatatggctggaattacagcagaaggtctaacgattaaagacttggaccaaatcctgacagactacagaaacgtagcctctcaggtcttcgccgacctagtttcaactggagacgaagttgacacgtctggtaactctgctctaggccgtctgatcggcgtagttgctccatcggacgaagctatctgggaagttatccagatggtgtataactccttcaacccggcagccgcaactggcgtggctctggataacctagtatccttctcggcaattagccggcatgctgcacgtccgacccgggctcaggttgttctagagggcaacatcaacaccgttattaactcgcctcccgcgaagatgatttccagcagtacaggccgagtgttccacctactacaaggcgtgatcctcactcctaaagcttgctctggtgttggaatcttccctcagacagtaggcaacgacctgacgtacgagcttaagatgtacgttgatgacattaacacaacgtctatcaagtacacaagtcctgccactggcacagtaacatccgagtccatcctagcaggactggccgccgacgtagctacaaatcacggaaataccttgacaagctacgaacagaatggtatacttttcatagtacctattgacccatttaacaccaagactttcgaagaagcctccaacctgagtattcagaaggttagaaagcttggtatcgctgttgacgacgttattggccctgtgcctcagcaagctctagctatcgatacgatctccattcctattgccggatgggacagcgttatcaaccctgttccagctatcactggccgtctgcgtgagaccgacgatgagcttcgcgagagattccgaaactctaaattcgtacaagccaccaacattctggagtccctaatcgacgggctgatgaacgtagaaggagtcgaggatgttaggattatcgaaaacgatacagacaacccagacccagttcatggagtcccgggtcactcgttccttccaatcgttcttggcggtattcctacagaggttgcacagtctatttggctgaacaagccattcgggattggctctgttggagatacagaggttcaggtggtagacagtcggggatatacccatagagtcaactaccagcgccctgtcgaggttccaatcgagatcaagatcagtgtaacaaacacaggatcgatgccagagaacattgaagatatcctacggccaaggattgtagcgtacgggaccgagaattacaagatcggagacgatgtaatttattctcgattctatgctccaatcatggaaatcccgggcttccaagttaacagcctgacgattgccaagaaaggacaaactcaaggcatggcgaacattgaaatcgggttcaaagaagtggctacattcgccgcagcagatatcaccgtaactacggtgtaatgatagaaggagaattccatggctgtcaaccaatttgacagagaagattatctggaggtggcccgggaacgggtcactgaacagtttaaagagaagccgatctttgatcgcttcctgcaagtgctattgtctggcaagtttgatatccagaatgcactggaagacctccagactctccggtctctggacacagccaccgggaagcaactggacattatcggagacattgtagggcgaccacgcggtctagtgtaccaagatattttcaactattttggattcgctggaacggagcgtgcaggttctttcggaagcctgtcggaccctacggtcggtgctccatggtactcggtcggtgctccaactggtaacgccagagagccgagcgacgaagagtatcggatgatcctgaaagcaaagatcatcaagaacagaacaaactcaaccccagagcaagttatcgaagcttataaatttgtattcggggttcctgaagtattcctagaggagtacgctcccgctgctgtccgtatcggcatcggtaagattctaacgaacgtagagcgtagtcttctattcgacctaggtggtgcaggtgcattgcttcctaagactatcggggttaactacacatacactgagttccaagctggccgggtatttgctacagaaggcttccccggaggacaaggcgttggagacctaaacgatcccactgttggtggaattctgaccaacctagtgacataaggagttataaatggctgattacagtcaactacctattgaaaatatttggtccacaggcggggatatggtagccccgacccctgcgcagcagcaaggcggatggggtattcagtcggttcctcgccaatggtggaactggaagtggaaccttcacgatactaacctagcgtatttgctacagaagggcatcccagagtggactagtacacaagagtacattgctaacaaatcgttctgcactagaggtggatttgtttacaaggctgttcgtacgcatacaggaagcgaccctgcacaagttagtgccaactgggttcgagcttttgcagattacaccacatctagctctgcacttggaagcctgacaccaagagagggtggaatcccattcttcattagcgctacaggagctagcgtgtttgactctacggcctatggtcgcggaatgttgaatgtagctaatgcctccgcagctagaagctacatttcggctcaagaaagctctgttgtactgtccaacctgtccactgtgactagggctgccaacacggttccgtacttcaacacggatacctccatggctaccttcaacatcacagcgttcggaagaggacttgtcaacgcggctaatgatgaaaacgcaagaaatttcctaggactagctaactctgctatcattacggcagacccagctaacagggcacatactctggtctatagagatgctgctggcaacttcaacgctggcgtaatcactgctaccctgtctggaaacgcaactacagctaacaagcttagaaccccagttacaatcaacggtgtggcgtttgacggaagccaaaacattgttcttccgggcctagatacaagttatgcgggaacggttgcacgtcttcacatcaacggagcgaacctttcgagtgcagataagactactcagctagcactgaggaacaaatctgacaacgactggattagccttgctgtagtggatgacaacattctccagtttgtattcagaagcgctacaaacccagttgtacagattggcaacgaagttatccttcacacaggaaaccagttctctctgggcccgactcttacagacgctaggtctcgtctgggtctcgacagactaactcaaggtagctctgatactcaagtcttccccagcaccttgaacaatggcccctacttgaccgtacaacctacggctatcggaggattcaacggtagcactaacggatggctgttccgattcgacgctaatggtaacatgactcatggtacagttcctgccgctagaatcactggtctgtccaactcggctcagattccagccacaactacggcgcaggctaactctcttgttcagagagacgcagacggaggattcagcgctattgcgattaatgcgtatggcactatcgtcgggtacggctctaacatcttcagtagagcatcgggcactggcaacgcccacatcgggttccagagagcgaacggaacagaactcggtcttatctggggagcccaatctaacaactcgatgaacttccgagttgctggcggagccaccgcagtgtcgattaccggtctggacatgactgttactggaagagtcaatgctaccacactaaacgcctctggaaacgtgaatgcgacaggcaacgttaacgccgggagcgctacgctcaatacagcagggaatatcacaggagccgcttacggagcctatggttctctgaccaactgggttgattcggtatatgccaagaagggagaaattcctaacgatatcgcaagagccggagccgcttgggacgctgtaggtcagtatattctggcgggagatcaatctggagggtctggtggaccggggacaactagagctggaagccagttgaagccttattcgactattagctacacagcaggggcactaccagcagcaggcacttacagatgtatgggagcgtttgcaggtggtggtaaccagattaccctgtggcagagaatttcttaatagagggcttcggccctccttttagaggagattatagtggaattcagaaatgttgtaaaatacaaaatggggttcgaatgcgaggtaaatcatcctcagtggggatggattccgttctacgcttgtgattacgacgatagagccaaactggtatatgacgccatcgcccgtgctgtcgataacggagaaatccccgaaccaaaggacgttacagatagagacctcgttgtagatgcacgtctgtggagagataatgagctaacccgggctgatcgtcaagtagaaattgctatcgacgatgaagacgaagtaaaagagaaggcttggcgtaagtaccgctctgcactacgtaagtggcctgagcataaaaacttcccagccgagaagagtaaacccaaagctccgaaggagtgaggtaagataatatgccaaacattatgaagcctacgggaatcaacgctatctggtctgaaaatggccagaaggttgacccgggtgctgtgaaagtagggctaggctgggttacggaacttcctccgtaccagactgcaaacttcattgaatataaacaagacctgtttaacgctcacgtcaaccaacatggtatccctgaatgggatagcgtgacagagtatcagggtaacctgagctacactcaaggcgctaacgggatcatctataagtgccttagaacccattccgacaagattccaactgaccctctgaacattacagccggatattggcgagtggcgtttgaggatgcgggagaggcagctaaggttcaagccaaccttgatcggcatgtaacaaactacaacaccctctctgggattggcaacgtagttattgcaagacaaaacctaagtgtgtatagtaaagctgaaggcgacgcccggtacgctatgaagcacgggaacggctctaatgttttcagcgtcgccactgccacacagccaactcacgcgatcccgctgagccagctatcgactctcgttcctcctgcgaccgagactgtagccggggttatggcagttgctacgactatcgagacagaagctggagccaatgataccaaggctgtgagtccgctcaaggccgcacaggtgtatctgaagaagaaagacaacctttccggtctgtctaacgtcactgccgcaagagctaatctaggactgtcggatacagcgactatgccttcttctacattcctgaaggcaggtagcaatctggcagatgtgcctaacaaggcgctggcaagatcgaatcttggaattacaagtagtgctacccagccggaaacctatttcttgaggagcgctcagaacctagcagatgtacctaacaaggcacaagctagagtcaacctaggcctcactgggatggctacaacagaccctgcggcggttatgatgaaggcagacaaccttgctggattggctaacactgctaccgctcggtccaacctagggctaggcacagcttctactagaaatacaggagacttcctgtcgtctggggataacctgtccgacctcacgaatgtccaagcagctagaaacaacctagggttgaagggagcggctacgctcgatgtatggggtcttcctgcgaatacaactgccatggacttccagtctaatcagtcggatatttccagaggatgggctcgactaccaaacggccttctgctacaatggggaactggtcccggtctatctgatgacacaaggacgaatatccaactccctgttccagcacgaatcttgaacgttcaagtgaccgtaatggggacgtttaacaactccatcggcccgggcgctttcatgacggatatgtggagcaacaccgggtttagagttagctgcaactggggcaactggtcttacccgttcaactggtttgctatcacttccaccctgtaattcaggagtatcaaaaatggctctaactgagcaagacttccaatcggctgccgatgatctcggagtcgatgttgccagtgtaaaggccgtcactaaagtagagagtcgtgggagcggctttctactttctggcgtccctaagattctattcgaaaggcactggatgttcaagcttctcaaaaggaagctaggtcgtgaccctgaaataaacgacgtttgcaaccctaaagctggaggatacctcggcggacaagcggagcacgaacgtctagataaagcagtcaaaatggatagagactgcgcacttcaaagtgcctcttggggcctattccagattatgggattccattgggaggcactaggttatgcgagtgttcaggcatttgtcaatgcccagtacgctagcgagggatcgcaactaaacacttttgtgcgcttcatcaagaccaacccggcaattcacaaagctttaaagtctaaggactgggcagaattcgcaagaaggtataacgggccggattacaagaaaaacaactacgatgttaagctagcagaagcctatcaatccttcaagtaaatctaggaaggttcctaatgaagaagctattcaaaagctggaagttctgggctgctgtaggctctgcaacttttatggctctggaagccatggttcatctttgggagcctatccttcctcccggcgtgttcgccgcagtagccacactggtagctgttggtgtgagaatttcggcagtgtttgtaactgctggtaaagtggaggaagcgatttcggaaaccatggaacatgacaccatagaagatggctcaatagaaaatgatactaactaaactcaaaaactacgccctcgtagtagctgccgcaatggcagcagggtttggatatctgtcgttctctttgtacggcgacttagctgttgcgaagaatgatatccaatctcttcaagctgcgtctcgacagatggaagagcagttccagaaagagcgagcagggtgtgagatcaccactgggagactagaggcgcatatagtccaaatgaagagccgacaggagcttctacaaggccacctgtgcgagcttgagtctctacctaacccaaccccaagggagacccaagaaaatgccacagagacgatctctgagccttctactggggatagtctggaccctgctcttacaagcttgctcgacagggccttctgttccgcagtaccaaacgatccttattgtgcccccggcaagcctgaccgaggaggttaaggtataccgagtggagcaagatacagtcaaggggctcgctagagcttacattctaaatactaacagtgctgccatgtgcaatagtcaactacagacaataaagctatgggcagaagagcagagggctctatatggaaagtaaagacggcaaagaaggcctaatcaaggtagctacacagggagttatctctctgctaattgctatcctaatggcttggtctggattcctaagttccagtctttctaagcaggaagaacgtatctttgcgatgcaaagagatatggtatccgaggcaaaacttaacgcactagagtcgagattcaatagccgacttgaaagtgaaattagtaacgtaagaagagaacaacaagaaaccaaccggtatttgattttgattatgaatgccgtcaagggtcgggatacagaaactcaataactataacccgttaacccacactgggagacaatataatgacaaggaaacaagactggccgctagtttcagcagtcggggctttgtttatctccctccttgtctgtatggctattctggctttcacagcgatgactcccgaggctcggtttgactctgtacgccagacctacgagattcgaattagcgaatctgagcggcggtatgaactcaaactgaacagactacaggatcagataaactcggcctcgtacacacaggatcggcaatcccgtttgcaatatgaagaactcgactcgcttaaaaggaagattagcgaacttgagcggagaataaaagaaaaacaagaataattaagccccgggagcgaaagcttaccggggctctttgtcatgggttttcagcgaacaacttgataaacttcatcgaacaggtcatcaagcttctggataaccttcttagccagcttcttgcgaactttgttagcctctgggctggaatggagtagcttaatatcggacgcgttgccccagtccatcgccccgttgtcgaacagcactttaacattcagatgcatcgagccctcgtcaatatcgacaactacgccggtcatccgagcgttggtcttttcgaaggtcggcctcggaatgtctatgtccagactgccaaccataacaacctgccctttcttaacgtcaaataattccatttaaaacctccttaatctaacttcattagtgtgttgaactgatgcctcagagacttaaaagcctgtggcccatcgtcttccgctccttcatgaatatgatgagcgattaagtgtatcaatcctcggtctcctagtaacaaagaactaggaatttcttttatccaagccacaaagcaacagaagtgtagaacctccggcatggaagccttgaagctggaatcatccagcttcgataggcgttcatacgtagctttaagatcgggatagcttaactgatatgtagcatcttcgtcaatatgctggtcccctctaactacatactgcaagctcatattacaccttctttccgccttctgcaagacgtgcctctcgcttatggtcggaacgggtcatattgtactcgatcttctcgatgatcgcacctgcaacatctagacctcgaacattcgcgtagtccatgatacgaatgatagcgtcagccagttccacctcttccatcttccgctctggcaagtgatcgtccatcaaatccttacggactccttcagccgcttcggcgatttcagtggtaacgagcatcagcatgtgcagagcatcacgtttaatcggctcgcctgtgaccagatcggtgttccacttgcggttaacaacctcaaggccagtcatcattttgttaaaaccgctaacaaactcgaagacggactctcgttcgaatagttcaccgaacgttggctcttgatcttcgacaattgcagtgtggaaaggccactccatccaagcgtcatagcactttttgataagctcttgttcgtcaatgtatgagaagaaatcttcatatccatcaatcgcattaacaacttcagttcccctttcccaattgcgcttatcaataagtctctggtcgattcgcagggaagtgctgccaacttcttcccatgatctccagcctactatgccatcgccgaagtacaacagaatgggcagattgaatccgcgttcttcctgatccttagtctccatagctataacaaacgccggtactttttctccacttacgccattggccaagacgaaagaacccaagtgggtggtctctcggctagctgggcgatgagcttcctcgatatgatctttaactctactcattaacttcaccctcctcgcagaacatttcaaaataacaatcgacacaagttagcatgccgtcgtcgcttacaacctcctcgggagggaagttgttcccgcaacattcgcacacaactcgatcaacctccctgcatccccagtaagccatatttactcctccttcagaagatactcattgctaataactttgaagctgaagtctcggctcatgcttttgaaaaccaagccttcccggtacttaccgttcaacgcagactcgccactagccattttaattacgagttgcatgtcttttggaacgcctacgtcccacatgtacaccggcacatgtttgaccgtctcaccacccaactggttcagcgtattcagaatggcaagacgctccgctggaagacagtaacgactgtccgaaatgttgtagatatcgtacacatagtattccggtttgtcaactccctcgaagttgccttgaatatttggtgcaaccagttcgccttgaagggcaatattcagaccgaaataccggagacgttcaccaagattaagctcttctgccatcgcagtgaagtgattggagtctttcttaatcacacgcttccagccccgacccttgaagaagttcttgatagcagtgaagaacccgatcttctcgtcttctagacggaaaccgacatttcgagacgccacgcctacttctccgtccttgtgccagatagtgagagacgaaccgtccaatttgaatgtcacttcaaacttctcgcccttctgatgagcctgatcgtaagccatctgaatattttgtacgcgagcctgatccgtcttcgggatgaagttggggaaccctagcttggaagtgccagtccggctgcccttgttgcctccattgatagctgcctgctcggaaggctttacatacttcaggatgcccattcgatcggtaacatcttcgtctactttcggctctgggctgcccgctgcatgaacaggtacgatcaggccttgactaagctctttacgaagcttcatggtcttgattcgagaatactcttttccaccttgttcgaccatattacggcctcgcaggaattcaaagatagggttatctacaggcaccatggaatccacttcaatgtagattgccagatcaccagcctgatattcccctcgtttgattacgcactgccaaccaccaacaagcgccagatcgaggctgtcagcgttaggatgggtcttcacatcgtcgatacgcaccactcgggctagtacgcggtcttgggaattactcatatattatcctccttgtttgaaaattggtatattacttgttaaaccagccgagatcaatagcccgctctagggccagtagcagattctcagcatctagaaggtcacggatcgcgatccaactaccactgtctcccggtagaccgtctgtgatatacacaggtatgtcactgtattcgctctttttaagcccgcaggcacaggctacattgtccccgaagacaatctcgctgacttcccttgcctcgtctcgaatatcgatcttcacacctaccctcctgttgtgttgaaagttgttgtattctgcccggatatcttcgcagtgtcaatagccttgacaagaaaataatccgtgatagagtgaggtctctgctggagagaaatgtccacgtcactcaccggccagcagtatagcgtatgaagaggaaagctgcaagcgcaacctgagtcgaatctgagaacagggcagcgacgacccgaaaggggaaagctcagagcctataaggaacccatgttccccgctcaccgactcatctgcatatatgtatatctgcatgagagcgagaggtagaccaaaggcatgtcttaggcggagattccgtatggcaagccttgggacaggtctgcctccactaccgatctatctgcataaagggggtacaatgtattcagcaactgttgtgaacagacactacgagaaatttgatgtgtatataggaagggggagcaagtggggtaaccccttctcccacaaggaaggcaccagagccctctacaaagtagatacagtggaacaagcaattgagtgcttccgaagtcatctttggcgtaacataatggaaggattaatcacagttgatgaccttctggagcttgacgggaagagattggggtgttattgtaagccccgtccttgccacggcgatgttctggtgagggcaatcgaatgggccaaacaacacagaggagtgtataaatgaaacatgttatttaccgagaagacctaatcgacctgttacgcgaccgtatgaagctccaagcgctggaggctggtggcgttgacaactgggactggtatgaggcctcgcttatcgactgcggattcttcgatgatgacgggcgtgagcttgaggtcgaagcacttgcagattgcttcccaaccgtaggtgcgtaaccgtggaggagtcgaaagctaccttcaaagacccttaccctaggttcttcgacgcttctcgtaggtatggcgaaaccaacgactgcatggtggtgagctttgcagtcgtatggaacaccacctatgaaaaggcacaccagcacctgaaagtgaagtgcaagcgcggttaccggcaaggggctactcagaagcgcttcagctacgcagacacttggtgccctaagacccggatgctctaccgggaggatgctaaggataagactcttaggcagtttgctgaggaaaaccctgaaggtcggttctggatcgcggtaaagggtcacgctattgcaatcatcgacggagtgttgtacgatcacactaatgacaaaagacgcaccatctggcactgctggcaagtgtggcccggggaggcacctgagaaaatcgagaggaagcctgatccaatctcacctcctgtgagaaaggccccagattggtatgtctgaagattacaactgaggaggaattatggaaattatttcgagagggacgctccctcaagaggttttgtttacggctaagtgccaccactgcttgagcattctccgggctaagaggtcggaacttaagtatgtttcgttctcattcggacgccccggggagactgggtattatttcgcagagtgccctgtgtgtaacgaagaggtgtctgcttgggttgtggttcctaccagccctgtagcacctcctcccactgtagagtatatcacaaaggagcgtaaataatatggaccagttagcaggattcatgggcgaacctttcgtaattgcgttcgactacgacgagacgatcagtctctaccctcttgccttccgaatcgtcatggataccttcaggggctttggaggcgctttcaatgtgatcgtagtcactgcacgccaccctgacaacagcggagagttagagtggctacgggactacgggttcccgatctatttcacggcacagaaggcaaagcgaccattcatggaaaatcttggaataaaagtctctgtatgggttgacgacaacccgttcagcgtggataatgaccttcctccgtggacagcggagcaatacgacgcctaccttgaggcaaagaagcaacgagctatcaacagagggagtaaagcatgagcgagattattaaggttgaagtgggagatcgggtggtccttaaggcctattgcgatacatacactggatgtgcaaagcgatgggcgcaggcgcatggtcgtttgcatgaactgctagctacggggtttgtagaagacagttgggtccacaccgacgaactggccggaggcttgaaaggcaccgttgtgatgactgaactgggactgaaggaagagtgctgtgcagtacgtctagacgcctacactgaccacagggctgttgtagttgttgacgcttctgatctttacatcgcatgtaaggcagcaaaagctcccgtaagcaccctagacgaggccttcggttgcgaccacgactaccttatggaatctccggctaacgctcagcgactgaatgagtccgtcgagcagctacgaactggccaagtcgtagaagtggacgtgcctatgagtgtaaagcaagacgaaactccacctgtcgtagtgcatgtagtagagaagatttacgataggaaaggtaacgtacacctcattctacagtatgaggtagcaggggcgctaatcaggacggtggttgaacagggagaactcatttacttcttggatgaaatgcaaggtatgtacttgaccaagattcaattggaggtgaacaatggagttgtatgaccagtggcgtaagtatatgagcgtcgtaatcttagaagaagaagataatgagcgtcagtgcatgcggcttattgaggcagttggcgaactcgatccctatatccaagatttcctagattctttctctattaaaactgaaggaggtgtgtaagcatgagtcagagtaagcgcgatgagattgtagttgaagcacgtgggctagagagctacttcatttcccactggaacggctgggatgtgatggacactgcttgtctcggattttatatcaaacctgagtatgttcttgacccggatattcgagagcttgagcctagcttcttggagcttgatttcgagcgttgccgtttccgattctggggaaatgaagacgaaggcgtggacggcaaactcatggagggcaagttgcagattatgaccaactccttcgagtacgtcttcttcaaggaggtttgagtggctagacagacttacgagtctgcatcagatagggcggtcgaggaggccgtccgttctgagcttgaagggcggtggaagtgttctcttcataagctacctagagcccactatatggattgggcagcctgccggaatggaaaggttgttagctttgtggagcttaaggctcggaataatgaaatgcagaaatatcccgacttctttgtgtcccagatgaagtggctccatgggatcgaaatgcaaagggtgtttgacattcccgcattccttgtggtaaagtggacggactatacaggatatgtcaaaatgacagccaacggcgtcaactacatgagcatgggtggcaggattgaccgtggagactggcaagaccaagaagttatggtccatatcccgctgaaagacttcacacgtttataggaggacacatgaagagactctgctaccgttgcatgcatcttggagagcctgtcatgctccgtcataagacgggtatctggtacaagggttgtagtaaatgtggatcaggagtattctatggctaagaagaaccctgtattcaagtttctgaatacagtaaacaagccctcagtggagagggataaaaccaaatacaggcggaagcctaagcataaacagaaggagcgattaaatgaagaagggtgataaagtgaggatcaatgatgatgctgataccatcttccggggccgtgttgccactatcatcgcagtagacgaagagggttgcgttatcgacgttgggagttacgaggatgagagcggagagctgatcgagtaccttcacctattctttgagcgttctgagttgtccaagcaggcgtaggagtgtataatgaacggacccgagtgtagatggtgcggagagaaaactgaagctgagttcgtagacgttgggcttggatggacgcagcaagtcactggaggcatgtgtcaccagtgtggagggtacgagaacggttactaccagaacgacggaaggctcacagaggtcgagtttgccacctactggagtggtccgttcgaagattatgcggatttctcgccattcaatcatatgagagaaggcgactcgccatgaaggctacactgagaaaccacaatctgctatacatctacttccacacgttctcggaaatgaatgagtggttgacagagaacgctgtagatcagtggacagtcactactctgggctccggctatcaggtggctgttcctatggaccgtgcaatgcgggaccaatacgtctcggaggggggttgacacgaacacaaggtgatgctaaactccgtggttgtctgaagtaaggaggttttatgtccaaaatgaccgtggcccaaattgcggctatgcacggtatcgatctgtattctgaccacaagaccgcttgtccccaatgccggaagaaaggcgctgacaacagcggagacaacctaaaggtctatggtactgatcgtaataccggggaacacaaaggtgcctattgttgggcgtgtgggtacaccttgctctctgaagagcaggaaagagacgcccggggagaagacgaagaggagtggaatttcgtgggaactgaatttaacgcagagatcaacgctcaaattaaagagcaatgctcgtatgatccgcgtggttatcgtggcctgtccaaggaaacttgccagtatttcggagtgctacatggtttcgacccggagactggcgagattgcaactcagctatatcctactactactaattatgaactcactggctacaaacagcggatcatgccgaagaacttctcagagcctatcggcgagaccgggaaggattgcgagctttttggtcagttcaggttcaagaatagcaacagcaagaaggtgcttattgtaggcggtgaggttgaccagctatcagcattccagatgctcaaggagtatgatgaccggcgagcaggcggtaagagtgattatgaaccgactccagtggtcagccctactatcggtgagagtggggcgtggaaacagctacaggctcagtacgagtggctagaccgattcgaacaaatcatcctctgtttcgacagtgatgatgcaggacgagaggcagcagacaaggcagccgataagcttccgaagggcaaggtgttcatgatggaaatgaaccgtaaagaccctaacgagtatttgaaagctggccgtcagtcggagtttgtcagtgcattctatcgagcccgtacatggacccctagcggtattgtagggtctgatgcactcgacgctcgaatgtatgaagctgtgcaggttgagaagattcctctgccaccgttcgctaagaagctccagaaggctatggcaggaggcatcccgttgggccggattgtgaatatcggcgctgcatcgggcatgggtaaatctactgtagtggatgagttcactctgttttggatttataactcgcctcatatgccgggtactgtgactctggaatcggactgcggggagtacgcaatcaagctgctgagccgtaaggtaggcgagaaggcagacttgtacgagaccgttgaagagaaagtggcgttccttgatcggcaccgtgacgctcggtacgacttgtggcacaaggaagacggaagcccacgcttctatctgatcgatgaccgagacggaagcctagcagccctcaaggctcaaatcgaacaactgattattcagtttgagtgccgtgttattattctggacccgcttcaggatattctggacggattgagcaacgaagagcagtcggtattcatgcgctggcaaaagggtatgaccaagagccaccgagtgacgttcatcaacatcaaccacgtccgtaagagtggtggtggtcagaaggctaactcggcaggtgctgaactgtacgaagaagatttccaagggtcttcgtccatcttcaaatctggtgcagctaacattctgatgtggcggaacaaggacgcggagaacgagttcgaaaagaacctgattaacgtgaagctctctaagtgccgatggactggccgcactggaatgatgggcaattggtactacgacgttgagactcatacaatctgggacttggacgactatctggaccgataccctgacaagcgccgtgaacacgaggcttggatggctcagaaggaagaggaaggccgggacacggaatactaaggttgacagaggggtgatgcttatgtatcatccctttcgtcgtttacaggaggaaaggaaatgcaacaacgatttgaaacaatcgagcaatacctcgaatggatgggaaataacaatttcaccaacatgacttgggatatcgaggccacaggcctgttggatgaaacgtctatcgattacactgccagcccctacaagattaagcctagctacaaacaccactgcattgtagtggaggagcacggtggcaatattctggcattctacgatgggccgacctacgtctttgacgggcgagagtacactgagagactgccgaaagcgtcttccatgctccacactgaagaagttgtgactctcaaggactacactccggtagagtatattcacctgccgctgaaagagttcaagaactatgtgctcaagcgcaagatcaagcgcgtagtggctcacaacatgattaacttcgaccttatgtcgatgaagcttgtggaagatatggacttcactatcggcgtagagcacagggatggcggtctgactacgtggtctgctgacacttggatgggcaagcaagtggtattcgacgataccctcgttatctccaagacttgtaaccctgacctgttcggcggtcacagtctggataagctgtctcgtcgtgcaggtggtgacaccaagattgacttccgtaagcatttggcaccggatgttcgattcctcgacttcgcagccgatatgctctactactgtatctatgacgtaaaggcgaacaccgctgtatggcattggttgcaggaccacgaagattaccaactgtccgaccgtgacaactacatcaagaattggctgtccccgattcagttggagaagaaggttgcagagatcatcacctatcaggagcaccgagggtttgttctgaatgttgatctctgtgaaaaagctgtgaaagacttggacgccaagatggaagagcgtcgggcccgggtagagcctgtgcttcctcctcgaccagctaccaagaaattcatggcagactacacaccgcctaagcggcagttcaagcagaacggggagatcaccagctacttgcagaagtttattgagcggattggggctcagttgaaagagggtgacgaccggacgatgatcttcgaaggcaaggagtacaagcttccgcttcccgctgacgtaccgctgaagacggaaatgcctgctaagatcggggacacaactcacatcaagcaatggcttatgggtgagtttggttggattccatcagagtggaaagagactgatctgactgtggatcagaagaagatcaagcttccgatggaaaacatcgttgctaagatcgatcgctggctggatgtaacgtatagcacagcgtacaaggaagagcggctggacgggttcggggattacatgaagatcacccctcgtagcacccgcgcgtatgtacgtcagaggttgattgatcgtgcaagcaaggggagctgtaaggttctcactaaccctagcttcacaaagggccaagagaaagaaatgtgtccagacctcgaacgcattgcagaacagtttccgttcgcgaaggatgtgattgagtacctgacctttaagcaccggcgaagcgcaatcctcggtggcggcatggactgggacgaaatggaggatggagaggagccggaaaaaggttaccttgcaagcattcgtcaggacggcaggattcccacgcctgctgacacttgcggggctgctactagccggatgaagcaccggaaggttgctaacgttcctcggatcacctcgttgtacggggctgagcttcgagagttgtttggggttggagatgggttcttccaaattggatacgacttcgattccttggaagcacgtaaagagtcggcctactgcgatcagtacgatccgacaaaggaatattgcaaatctcttatgatggagaagccatttgacgttcacacaatgatggctaagcgtatttctgagatcattggtcgtcaatttaaccgatctcctgcgaaaaacgtaaaatacgggtgtacgtacggtgcccaagctggtaaagtggcaaaaaccattggtgccgatttgcaaacgggtcaactggtattcgatgcgttctgggatgcagcattcccattgaaagctctgaaggacgacctcaccaagcaatgggaagccaatggcaagaagtatatcattggagtggacggtcgccgagtccctactcgttcggctcacgctatcctgaacagcttgttccagagtggcggtgttatctgtgctaagcgggctatggtgattcatgatgtactactggagaaagaaggtctgaaggttgactttttcaaagaagactggaagaacaagccggaattctgccaacaaatgatcgcgtaccacgacgaagcgcagttggaagttacagctaagtcggtcagcttcaagatgttcccttggtctcttgtaggcggtaagccagaaggagaaaaggaacaggaggaggcggagaagaagctgaaagctctagctcaggcttacaaggacgaacaattggctagtactggcaaggtgtggagtgatatcgcacactacagcaaaggtgaaggcggggtgtttgtagcttactgccgcgctggagaacttgccacgaaggccgtgagagctgcgggagagttctactctactcctctggtgcctatcgagctgaccgctggctacatcgttggtcgatcttggaaggattgccactaaaactggcattaagcgaggaaaggggcttgacaggcccctccgcctcctatacaatggccacatattcacaacatacaaggagaaacacaatgactctggctttcattatctatctggtaatgaccgtattcccagccttgtcgtcggctggtagctttgccctgatcgtcaccatcatcgcatgggttgcaggagggttcgtttacttggcatccattggtggccgagagaattcggcagttaaagccacactcaaaaatcacctacggcccttgacgttcaagctgtttctgcctatcattgtaatcggccatctggtgccttcgtctgagacggcatggtggatggtcggcgggtacgctgcacagagcctctatcaagcagacgctactcagcaggttctcagcgaatctactgaactgctcgaagctctggttaagcgggctaagaaagaaactctgaaggctgttgaaggcagcagcgagtgatacggtaatcacagaataggaggtatggtatgaacacggctcgactctacgtctacggcaaatcgtccatggtaggaatcactgttgacaacaaggccaatcgggagtactatacctctaaaggcttcgaggtatcggagacaccgttagcccacaaaagcgtggctaacaaatacaaacagaaaggaggtaaataatatgtctggtgttattcccgggactatcgtcaaactcactcaagtgggatgtgacgtcaccgttggctggccaaaggaagcccgatatgtaggcgcatacgcagtcgcagtagatggacgcgatatcggtctcccggaaggggaaatccggttctgctcccttcattggtccattgaccgagacgtcaatgatggacttggagactaccaatcgatgctcgctgacaacgaccgcttcgaaattgtagcagttccgggcaagaagtattacgttaagaacgttgccaagcacagcgcacagatcggccattacttggttccttcggagccagccttgtacgtaggtttcgagccgtgctggctgaagagcatgcacgaaggggagagcccgttctgcatgacttttaaaggacgcgttgacattggcggtgaaacctctgacaagccgcagttccagaccctctaccctgagctggtactggaagagtttaaagaagaggcggagggcaaggttgaagctccggttgacgaagagaagaaagaaaaggttgcaaagcctgctgtaatgggttatgctgttctcgatgcagacgggagtcctcttaaattctgcctcactcgcgaagaagcccgagccaccaagcgctggtggggtggcaaggctgagggagtctcgattgtaaaagtaatcaaaggagaggaggtgcgttaacgcgcttctcctcttgcagaatccgggaatgtccggtatgatcgtcagtcaagtggctgacacactcgcccagtctagggtacttaaataggagaaatgaaatggcttttaaactgaacgtaaccaccaacactcaatccggcaacggcggcgtccgaaaggaagtcgattgggatgctctgaacaaccacgtagttgaagctgctggcactgccgctaaagcgcgttcgatcccgggttatatctccggtatcatcgatctcggcgagcaagagcagaacgatgcagaggttgtgttcactggcactgccgaagatgaaatccaaatcatcaaggaatatccgaacacttacttcaaggatggactggacaagcagactcgcaagcctgtacgtctgaagtgctggccgcagcgcgatatgcaacaaatcgcgatcactgtggacttccctcagatcgaggtagacaagagcctgtacctgaccggtaacagcaacaagtctccgcttcgtgtcctgtacaacggcgactttactctgccgggtcagaagactaagattgttggccgtccgtttaccatcaaggaagtgaagcacccgaatggcaaatgggcgttcgccaagaactccatgttgcacaaacttgctgtggctactggcgtcatcaacgaagacgaactcttcaccaaggaccgcgtaggcgagcttctgggcaaggtggctcagttccaagtgcgagtgtggatgaagccgggcaagaacgatatgaaattcctcactgaggatatcagtctggtcggtatggttcctgaaggtgttccggttcccgagctggacgagaagtacatctacggtgtcaacctgtatggcgagaacgacgaagaagcagtcaagcaactgcgtgctaacgtcatcaacaccatcaagcgagccaagaactacgaaggttcggatatcaaggcgatgatcgaagccgttgaagctgcacgcggtggtaaccgctccagtggcgacagcgaagagcaagctgaagataagccgcagacccaagctgcacctaaagtggagccggttcaaaccaacgtagatgatgacattccgttctaaagggcggtggtaagacaaggggcttcggccccttcctttcaaaatttcaaaggaggcaacacatgcaaatcaattttggtcccatcttccttctcgcagcaatcgtcctgtgcgttctgaaatctgccggagttctcgctatctcttggactgtggcactcatgcccatctggattcctcttgtaattgtattgtcgattctcgtactgtttcttgtaattgtaggtctgatttacgcattcggcgatcgtactaaactgaactttagctttaaaaagcacttccggaataagtgaggactaatgatgagtagtttggttattgttcgagtacctgagtacattctaaaaggccccacagtaaacaaccagttcagcggtgacctgtgggagcgaaatctcttcaaagatttgaagaacgctgcggagtgtatcattaaaggagagccggcttatgttgctcttcctaacaaggtaaaccctgacactctacaaacagagtgggacattcaggttgtacagttctaacccaaggggagcttcggctccctttttcattggagataaaaatgagtgaaaaggaagaggatatcgtcctcatcgacggcgaccttatcgcctttaagtgtgcaagtgtcaacgagacccgctccatcattgtcagaaacaaattgacaggagaagaggaaacttggaagaatcggacgacttggcgggagaataacaaagacgaagagggattcaacgaagacaacttcgaaattgaggaccatcaagaccccaagcacgtgtcctacggtatctctgttgttaagaccatgatcgaccgaatctgccgccaagctgggtgcaagcagttcaagattctcctatcaggccctgataacttccgtgacgccatcccactcccgaaagaatacgagattaccaagggtaaaaagaccttcactcgtggtggcaggtacaagggtaagcgtacagggcagattaagcctcttcagctaggtcagctaaggcagtatatgatcgaagcgtatgacaccatcatccatcccggagaagcggacgacttgatggccgaaatgatgtacaagaacggtgtaagctactccagaggggagactactcagcgcgtgatcggggctaccatcgataaagacgcagacggcactctaggatggctttgtaactacgaacgtgagcctgttcaagtcaagttcatttcaggcctaggatcgctctacagggactctaagggcaaggtgagaggcgagggacgtaagttcttctacttccagcttctattcggagaccctgttgactgctaccgacctgctgacctgtgcatcgggaaggacttcggagaagtggcagcgtttaacatcattaatccctgcacaacggacaaggagtgctggcaagcaatctacgacacctacaaatcgtggtaccctgagcctgtcacttacacagcatgggacgacacagagcacactaaagatgcaatcgatatcatgcaaatgtattgtgactgcgcccacatgcaacgttgggcgggggatcgggtagactgtagggctgttttggctaaactcggggtagacttaggaggtgcagaatgagtgtaaggcctcgcccttgggaagacttcccgggcatctggaagaccgaagccgcgttcttgagttgggtcagaggtggcattcgccgctatctctggtctaagaacccggtcaagcttgagtttgctaaatcccgaaggatcaagatagccaacaccaatgaaaagagcaagctcaggaaccccactgtatggggctatgtgtgcgagcagtgcgggaaggagactcctcaagctaacgttgagattgaccacaagacgggggagttctccctgaagcgagtagaggatatccaagcgttcgtggaaggtgtggtgtttgtccgcataggagatttggctgtcttgtgcaaaccgtgccatgagatcaagacctatgcagagcgttacggactcacccttgaagaggcgggtatcgtaaagcaagctattgcaatccagaagcagaaagggtatgataaggccttcttgcaggaggtgggaatcaaacccgcatccaacgcagagcttagaaaagaacagatcattgaataccttaagtctaagaaggagggtggatgaacgaggatcgggtttacattgtagtaagagacgaggcaccagagtacatggtgccgactctggttgcacatagcatcctaggggcagacatggcaatggttctcctcggacaggaccgggccgttccatcgacggaccttccgtcccgtccgtatatgcatgcagcggcaaaaaccgccattaagtgggtggagtggaaacagtggagcttccgtaagatcgttgtacgagtttctgacaaagagtacgataagatcaagcaaatccctttcgtatatgaggggtatgagagaaccatctgcaatggcgaaggctcctgcctagtagtacctcctctgagcaaagaggagaccccgaatgttcttaaatttgcaaaattatggaggcctctgtgagagagaagtttttgagaattatgcggaagctgcccatccgggtaagggcttcccttgttatggcttggattgctctgttcttctggctcccggttgcaactgcgctaatcgttggaattctagagttcttcgataatgcaaaagaagagttaagaaacggatactctgttttgatcgaagctgccaagggagcttaccagtgcattaaaacgggagaggagttggagtcatgaccaatttagctacgtatgttatacgccacaaaaagaccaaagagctttggaccactcctaaaggaaagcggcaatggaccacgaaaggaggggcagcccgagcttggagaaacgcatatgagagtactacactaggagcgtactatgctaaaagagatatggaacggtggcctgacctgaacattcctttgatagtaggggccgctcccgcacgtctggccggctgggaagcagcatcttttaaaaaccaatcagctttcgagattgttgatattgctgaatccctgaagcacgaaagccagttggtgctcgatctactgaaagatgttattgggttcgaagtgccagaccacatcggagacggatatgtccgactcaccattaaaacgtccacatacgacgatatcatcaaactactgaaggaggcaaaatgagcatgactgacccccgagcgtatttcatcaaacaggagctggaggaagcaacgaagcttctagaaagagccctcaaccttctagataacgtccattgctacgatacagatgtatacgaggacattgcagcattcctctacggtcaagagtgcgaggaggaataaggtgcagcgcgatattagtaaaactatagcagaacttcgggacttgatcgaagctgtctctatgctcgacgaggccttggttatgatgcagaaaaacggactatatgatacggacttgtacaaacgtattgatgcgtttttgtattatcaaccgggcgagggcgagtgggaggaagtagaatgagcagcaagaaacactttgtaatctctgatacacaatgcaagccgggtatcagtctggactacatggaagctatcggtaagtatatcgtagccaaacgtccagatgttgtgattcacatcggggatcactttgacctcgccagcttgtcgtcttatgataagggtaaacgctcctctgagggccggagatacgccgaagacgttcaagtcggacgtgagggtctggacaggctgttcaagcctctgtgggagctacaggagcgtcaacgggctaatcggaaaaaggtgtaccaacctcggttgattttcacactgggtaaccacgaagagcgagcagaccgagcggccaacgacaaccccgaattgtacggcacggtcggaagtgaggaactgggtattcaggattatggttttgaggttgttccgttcctgaagcctatcgaggtggatggcatctattacgtccactacctacaaaaccacttcactgggaagcctctgggtggcacagcgaacaacatgcttaaggctgccggtcattcgtttgtcatgggccaccgtcagcttctggactgggcgatccatcctacaattgacggaaaacaaaggctaggcattgtgactggagcgtgctatcctcacgacgaggcttacaaaggctatcagggtaacaatcacttccggggttgtgttatgattcacgaagtgaaggatggttttggtctgccaatgccggtaagcctagacttcatgatggagaaaggaggtttcaaatgacggtttataagttctggtgtgaatgggatatcggtatcaatgagtgcctgtggcgagactactaccagatggaagaagatgtagctaaagccttgtcagattgcgggattgatgatactattgaggaactggaggacgcaggcctgctcggcttcgactctgttaaagttatcggctaattaggtaataggagggcatatggctgagtttttccttggggcggcccttgcaggcttgttctttatgtttagtatcactgcgagctttaccgccgaagatattgagaaagtgacttcaacatgcgagaataacgaaggcgtcaagtatttcggagttgacttcttcggagacggtgctgtacactgcaacagcggcgctattttcaaaatcgaccgcaaatctaaataatcgaaaaggagatataaaatgactgatttcaacatcacccctgagcaaatggaagaagcaatggcaggtatgaaccctgagcagcgggctctggtagagaaagccttgaccgaccgtaaatctctggaagattccatcgtgaccgaggacggtgaactggactatggcatgcttgcacgacacatccgcaccagcttgggtgatctgcctctggtaatgggtggccctgacttcctgaagctgatgatcttggttgctgcgatgccggagaccaaagacgatctcctgactctgcacatgaacctgtccttcattctggactgcattcgtgaatcgattagcgacgaggagtaacaagtggccgaagagattgtaaaagaagacctatctgtcgacgatctcatggttgactcagcagggctagatgccctgctggccttcctagagagtcagtttaaaggtccgaagggtgtactgaagggatatgtcactatgagagtgatgtgcgctaagatcgagagtcttgacgggtttcaagagttgaaagatatggaggtgaactttgagtaacgatatcatcaacgttcatgctgggcaaccgatttctctggtgcaacggtcaaagaatcctatcaatattcaatattgggacgccgataccatcccttacggaacagtcttggttgttaccgagaaaaggggtgatatacgaaagggagaattggtcgtaaggctggctagtagtgcagatgatgagcactctgttaaggtatgtagattctctgatttcttcctcctaatggagaggggttatgacgcagccagtctcggcgacgttaaacaagcgtatgatgttctgttcgaagatcacccagtgactacctttgttaactgggatcgggctcagcctttgacaaacagtgagcgctactacggagactttctgattggcggcgaccctaaagggatgccactattcaacatggctgttcttaaaaatgttctgtcgccttacactgccgacgatgaggaactttcagctatgtctgggaatcccgagacagtagagcacaaagaagttgacgaactaagtgagagggacgaggctttagccgaggtcgacagactcaatgaagagcttgttgcactgggtaagaaggttgtgttcgccaacctagaagattacctaggcaaagaaaactatgccacattggaagctatggctaaccacaaggaggctgtaggtagcggaggctcctctagttactacactgtcaaggtgaacaaccccactacgaaggctaacatgccgtattttgcagagtgcaacgatatcatcgaagcgctggatatgcgattcggtcaaggcaacatgttcaaagcgttgtggcgggctgcggcagcacagaacctaggcaagctgaaggccggtaacgatgttatccgggactacgagaaagtcatcttcttcgctcagttggagatcgataagattctcagagaaaggggttgacattctccccgaggcttgcgataataggctccaagttgaaacgaaggaggtgtgtagatatgatccagaaactaaaacagaagctcatgatggtgcatcctatcctcgctagcgagatcgtctggtgcctcaccttcgcaatgcttcagtaaaacaagggagcttcggctccctttattgtatcaaagatttaataaggagagtttatgcaaatttctgcaaaagtgattcaacacagttcccggatcggcctaggtacgaagaatcacagattcatcactacattcgaactggagtatcctcggtttattcacagtgaacttatgactcaccgactttttagtcgaaatgctgcaagtagtcgtgccattcccgttgcccatatgatccgacaggtggaagagaatcctgcgatgcctgttcactggggaatgaatcaaccgggtatgcaagctgagttcgaactgagtgagtgtttgcaacgtagctctcagtacctgtggaagaaggctgcaaagagtgcggctcggatcgctagcgcactaaataaaatgggactccacaagcaggtggttaaccgtctccttgagccgttccagatgatgaagaccgttgttacagccacggaactagataacttcttctacctgcgttgccataaagacgcacaaccggagatcaaggttctcgctgagaaaatgtatgaggctcttattaaagcgggcccggcagaggctctatatgacggagagtggcatgttccttatgtgactcggttccgcataggggatggtaagctgcgttacgcagattgtaacgggcaagaactgagcgtagaggatgctattaaggtatctgctagctgctgtgctcaggttagctataggaagaacgacgagactctggagaaagctcttgtaatctacaaccgattggtagatactaagcccgttcacgctagcccgttcgaacaccaagcaacaccgatgctccgcatctcggacaatcaaactggatgggaggacggtgtgacgcacttggaccaatatggtgacctctggtctggtaacttccgaggtttcatccaacatcgtcaactaattaaagggcacgtatgtaatgagtactacggccaagaagaggaaggagtttaaaaatggcagaatataacctgagtctggaagacctcatgctggtcgatggcttcaaagaggcgttccagagtaacaatgagaaggtagtaagggagcatctgtggactaacggcatggatgttaaaaactactcgtatgaaatggttttctgtcagcatcgcaccctgattggccgagtcgtagagggtctacgattctctggctttgagcgtacagacaaggagtggctgagcctcggttgcgcctctctggaagctcatattgcagcgtgtgatgatagtaatctacggttcactcttcgtaagatgcgaccagagggatcgacagaggcaacgttccacaattaatgcagtaggagtagatatggaagttacaaaggctctcgtagatgaggccgatattttcaataagatcacacaaatcaggactccaacggagtcctatgcccggaaatatccggtcattgtcgaactagcaaaccagcaactagaagagaagttgtggttctctagcgaaatgaaggtagagctggataagttgaacctgaagtttaagttggaacctcatcagcttcacgctgtaaagactgtccttcaactgttcctcaaatacgaactgatcgtaggcgaggagttttggatgggtaaagtagtccgaacgttccctcgcccagaggttaaactagcggcttcgatcctgtgcatgatggaattggcagtccacgctgaattctacaaccagatcaacgtagtgctggggatggatacagatgccgactacgtggcgtacaaggatgacccggagcttatgggacgtatggagtggcttgagtctgtgctaggcgacgaagacgatgttctttcggtaattatcttcagcctaacagagaccgcccttctgttcagttccttcgctatcttgaagagtttccagtgcaacgggtacaacgatatccctgtgatcgcacgcggggctaaccagagtgctgtggatgaagacttgcacggtgtagtttcggctgagatcatcaaccaatactacgcagagattggtcgaccattgtctgaagatactcggcgtgtcgagaagattcgacaagctatcgaccatgtatatgctcatgaatgtcgtattgtcgatatggcgatcccgggcggagaacttaacggcgagtcggctgaaaactataaagcgtttgttcgttatcgtttgaacgtatggtgccgtcgtctgggtctggaagatcatttcgagaacgatgacactccgatcaaagattggttcgaaatgaacacgtacgcttacaaaatgattgacttctttactccgggaatgggcatggagtacgaactggggtgggatgaagaggaactagcaaaggcttgggaagaggagctgaaatatgagtaagagagacacattcaactattccgaagctaggaaaaacagtcaagcagcaggagagactcctctgtggtatacgacggctggctaccagttgttcatgaagaaatattcaaatgagggagagtctgttcgctctcgttttgagactgtagccagagctatggctcagcacgcccctacggtgtatcctgagtggtgggaggaggacgaatacactagaggcaaggactgggaacaggtattcttcgacgttatgtgggacggttttgtaagcccatccactccgcttctgtcgaacggtgggctccgcaagaagggcactacggtatcctgtgcaggcgggttgatggacaacaacctctatgaccgttacaatgtaatgacggagattgcagtgctaacgaagcatagtcacggcacaagcttcagcctgaccaactggccatccgaaggcgatgccattcgtggcggagagtcacagggtgttatgcctgtcattcgtgacgttatcaacgtcatggaagaggtcgcacagggttctcgtcgtggtagctgtgcctacagcattaacccccgccacggggacttctggaacgttatcgatcacctgtacaagcgtacagaatcgaacaacgtcggatggttgctggacgacaattggtgcaaggctatggccgagaaagaccctgaaacgctgaaacgatggaagcggatgatgttcgttaagctggcaagaggcaagggctacttcacgttcattgacaagatgaaccggcacctcgcagagccgttcaagcgagcaggtctgaaggtagaggcatctaatctttgccaagaaactgtgcttccagctaatgacttctacacattcagttgcgtgatcctaaactataacctcgaactctaccgttcttggcctgagcatctagtgttcatcgggcaggttatgtcggattgcaacatcagcgagtacctcgcaaccatggacgaagttagcattcaggaccgaagggctctggagaagatttaccggttcaccaaggacttccgagcacttggtagtggggttctaggattccatactctgctccagcgggaacgattcccggtcggcagtatggacgctatgttcctgaacaacgccatcttcaaagggatgaaggagcaagcggaagcttgtaacagttggctagctgaggttctaggggagccagagggctgccgtggactagggaagcgtaatgccactacaatgatgatgccgccaactaaatcgacggcagaactcatggctggggcttctgagggcatcggactggacgttgctatgtgcttcaccaagcagagcgctggaggtgaattcttccgtgtcaacaaggtgttgctggagattatccaagagcgaggccttgattgggaagagtgtgcaaggcagatcaacgaacgcaagggaagtgttcagcacgtagactggctaaccgatcatgaaaaggctgtattccgtactgcctttgaggtgagaatggaagactacctacgactgtgttcccagcggcagaagtacatcgaccaagggcagagcatcaacctttatttcacgtcgaatgactcgccggcttacatttcgtacatccatcgtctcgccatggaagacccgaacatcctatctctgtactacatctacagtatgagaggagcgggagatatctccagaacagaagaatgtgaaatgtgcatgtaaaatcattggcccggggcttgacagcttccgggcctttgtgtattctgagcacatcaaaacaaggagggactaaaatgaacaaattctctgaagtgtactacacttggagcgcagcgtgctctcgtacaaatatcttgatagatatgggatggactgctacaatccgtcgagacttcactggcgggatcaaccctgtatgggttgtggagttcacgcgatgaacagcaaactccgcaaagagttcgataaatggtggggacaggacgagcaagaagaacttcgtaaatcctgtgccaaaggatgggcggaatatatctggatggctagtcgaagaaaagtgagtgttgagcttcccgcgccagaaggcggatttatcgacatccaaaagtacacaatcaatcgctgcaaagaagctatccgcgaaacaggactggaggtgttttaatgaaagaatattttaaaaagcgactaatgcagaccagtgaaccgttcgattcagcgacgcaagctatggacgtagcgattgcgtggggaggggctaagtactgcgaattcacttgcgtaactgcggataatcgcgtcatcagcatctgggagtacaatgacgtagagcctgataaaccggtattcaatggacagcaacgaatcttagttccaacttttgaggaggtagtataatggaacaaactattgataaatctcggtatattgtgcttgataacgaaggtcggcacgttctgaccttgtgcgagaaggccgcctataacctgcttaaaggcgttcagtggacaaaggacaagcatggtcaaatccatgtaaatggtgtcacaggcgttgaactcggagttcgtcaagggattatcgctgaagtattcctgtatccgggctacatcatcctagaagaggtagactaatggatatgttcgataaatacatgcaagttatgtatgaccgggacgctttctcaaggcgagtcggtgagttagaaaaagaggtagccgaactcaaggctaaggtggctatcgctaagtgtgatatgcgtgtcgtgaaaaccctactggaagatatccaatgggtgtatcaagacgaagctatctatactctaccgggctacgtttgcccttgttgcggggaatctgcaaactatgggcatttccaaggcagcttcgataagagcccctgcctactagcttgtgtactgagccggagtgaagcatatgaagcctaatgttgtagactcgctaggcattaacatgtgctacgcctgcggaggtaaactgtacgtccgaggagtatgcactatctactgccctgactgcgagaaggcagagaaagataaaccgttcgtcaggatgcagcttctacaggatatcgcagacagtaagaggcttgacacagaataatattctttgtaagataagcccatcacagacaaggaggagccgagaatggccactacagagaaaattattgagtacgtcgaggtgtgcatatatcgcttgcaggaggacgtgatggcctattctaagggcttcagggacagagccttgtctaatcggacaggctacattcacggcctgattaccatggctgaaatgaatgagcaagtgagtatcgaagactgcgacaagctccgagctaatctgcgggacgcttctgaagcagtgatgaacacattggacttttaaagtcaactaggaggaagttatgataaaagattttgtaaaactcgttggcttgtctgccgtagcctgccttctgcttgtatgtattataggcatgtttgttacagttctgcacagtggggcagagattgttcaatctcagatggaacagaaagacattatcgtgtctaccgatgacggcaccatcaatctcggtcgctccgtgaagagcgagaagctgctgtacagcatgtgcatcaaggtggaagaccgtaagccagcttgcgaattcaccaccaaggataaggtagtacatgaagtgcggcaggtgatgcgcccgggcgaggctactgcacgtgacattaagattgcagttaacgcagcagtgacgtatactggagagaatggtcagaaggctacctccctgatccctccgaaaggtgaattcctgccggcaggtactccgtcagaggtgcatatcgaaacgattgaccgcttgttcgacagcgtgtataatgactacaagcaaaacttcagcaagatgtgaggaggactcatgaaagcacagcctaaagaagtagagaccctatctttcgacaagcgacccaaggccggggatatcgttcgactgcggtccgatggcaaggcttacgaagtgtgtgctgtgtatccgacagcggtaggctgggaggcggcgcttcgaagcgtgtacgacaaaaccaagactgtcactgtcggcatggagtggtgaaatgtccgcgactaacaagtgcgtcaacttcctccctgtcactccggacgggcgagtgatcgtccggttcggtaaaaagaggttaggatggctcggtaaagagggtaaaaagtggtattattacccttatggatgcgaaggcaggatcaaatccgaaggcttcaaaactctgatcgatattaaggcgtggattaaaaaccccgactcggtttggcccgggcccctagcttgagattgactaataagccgacgaatggtacaatgggatgtaggaaattccctactcagtataaggaaactagcaatgactagccgctggaaagaggccgtgtatcgcaagtactcggtacgtcgtctgcggcaggaactcgaagagttcaaagaagctagacgctttgcaccaaatcaacgcatccgtgcatggtttgatgctcatatcgaatttctagaacgccacttggctattcgagagtccggccaagcctacccagacgaccttctgtaattaagtgttgtaggtagagattcaaatcatggttagtggcaaggacgccacactttcagcccgcccacaaggcgggcttctttttgcctgcaattcagggttgacttggagtaccagagcatgtagacttaccccgtccaacacaaggaggaataaatatgaaattcaatatctcaagacagttatgggtggctaaaagccaacggaagggcgattacaagggaacgcccttggcgtacatggctcaagtagacttcaacaaggacggaagcttggcttctagcttcaagaagaagcagcagacaggtgagggctgggcaggaaagagcgctgagacgtgcttcgtagataatgtcccggtaacggggcacttcatcggcgacagcgtggagcgctgggtgaccgagaacaagtacttccgtgtaacggacccgcgaggtttcgttctggaagtcccgaccgggaacatctctaccctgctattcaactgcactgtagtcaagggagtcattcaagagccttgtgtgtgggttcggatgggttctcagcacgttctactgccggaaggttcctctctctacaaagaggctgtaagcttcgtggagcggaaagagtcagccaagaccgttaaagatatggttgcaggggatcgatgcaccctccttagtaacggtacagaggcgaaggcggaggccatctacctcggacgggtgaaactcacttggcaccttctggctcaaaagggccggtactctaaccgtggacgtggcgggtgggcttatcgctggggttaccaccatctggagcgggagttagatagaaaagaattcaccgagaaagattccaagtgggttagtgtgtttgctaagaaactgagtctcggtggacgatggaccctcgacttcgttctatcgccgaaggccactgatattcagtctgggacagttccagaggaacttgagaatctggacttggtagatggtgtaatgtgggagtatgacggagaggatacccgcccaatggcctactactattctgtacctgatagggtagtcaagtgtatcaacgtagacgaccccgcatgggacgctcgatcctacgatgaggtaaggtggactaaagagtggactgtagtgggtgccgagtggcgaaaataagccaccattattttagaattgcccggcgagagccgggctttttcatggcaggggttattttcaaattatttttagatttctgggagtttcggccaatatgggcaatatgaaatttctcaggaaaaggctcagaatgctcgtataagagccgttcgagtgtaggtatggtgagctactacttagccgtagaaggacagtgtaacgcttaataggagggttagaatgaagattgacaacggtggcgaatatgcgtattggctggcggatatcaaagagtttgtttctcagatggatgccacagagatcgagaagagggcttgtatagcatacttaattagctggtatcagcgaagagtactgcacagaattaaacgggaggaatacgaggagatctaagctagggaccggatggatttttagggactggatagattttcacagactgcaaaattgagaactgggcagatttttaggaactggacagtttttcacagaaggggatttttctacagaggaatttcccctgaaatttagccggatttctcagaagggcggatcgttagcaggctatctaattggttagcaagctacctttaatcgttagcacactaactaaaaattcctaggacggacctcagttggcacgaacgttgcaagcccgcaccagtttcccgggcaggcgtaggcctcgactatccgtcgtgaaggcgatatgtagttggggactcgcaccccgcgtttaagatgtgcccattctactatgacagacagctttgtcaacattctttttatggcataggctttgcaattgcaattaacatgccaacacaaatatcaggctcctccggtgtttatctccggtgctcggcttccagcctgcgttgcccgcatgcctactattatacacaagctatcaagagaagcaagaaaaattatagagaaaaatctacacaaaggaggttgacaggcctcctttatatatgcacaatgatctcacattcaacggaacgtcaggtaagcatcatgctacatagtgaagcccgggagatggccctacaagagatgggcaagtggagtctcctcgaacaaggttggaaattcagtttcaatctcaggatgaaacggacgctgggacgctgtaatcatactaagaagctcatagaacttagctacgggtatgtagctgctaatgggctcccggcaatattggatactatccggcatgaaatagcccacgctaaggcgggaccggatcagggccacggatttgtatggaaagagtggtgcggcttgattggcgctaaacctcagcagtacgccagcacaaaagaaaaagtagtcaatttcccgtggcaactggcgattcagcacgactccgggcacttagagcggctcaatcactacggtttcagacggaccaacatggcgaaaaagcaggtacgcgggcgtcctgagacaaagggcagactagtttgggtgaagagtgaaaataagggttgacagcttaggccattcgcgtagaatggccctcaagcaaagggaaacaccctgagcaatcacgaaggataagtagatatgaaagcgctttgtaatcatcgggcactctacgcagcttacagccgtagcgagattgatcgcgttgcggtagacctgaaccgttactttcctatcgagaaagatgatgaatgggaagatggaccgtacatgtaccgccgccggacctatctggtgaagcattcgaagggcatagcaaggtggcacagtctctattgcaatgggaccgtccaaggcgttggcgtaatcttcgacgtaaagtcgggcgaacctttccgcacagcataaggagattcagaaaatgcaagcttgggatgtgtatcagaacggccaattgatcgatactgttttcttcgatatcatgtgtgatgccgaagaggtgcggaaatcgctggtcaatcacgacggatactcgtctgatactactgtagaggaggttgagtaatggatagtctatctgttaaaatcgttctgtcggaactgagctacaaggctctgattcaagccttcgccttgcttggccgaacgctcgacctagacgaggggttggacgatatacttaatcttattgcggatgagatcgctttccgcgacggcctgccgcctttcgcagacgactgcgataaaacagaatggatgctccgtcgatgggaatcgctcccggtggtatcgtacaatatcgggcaggacggaccgattgtcgctcggtctatcgaagtaaaaacggcatgaggggagaactgatgaccgtcagagtaggagatatcgtggctatccggggcgacattcggaaaaagctcgacggaacatgccaatacacgcccgaacaattggtaggtggtaaattcctcaagcatgccggcacgggagaaatatggactggccgagtgagtaagatacaaggtgatatggccaaggtgggaggggcttggcgcgggatcgaattctatgtgctcattagtgaaataaacgcttgacaacctgacccactagctgcaaaatagcactcacagacaacgaagacgccgataggcgaggagaaagcagatgcaaatgtttttcaaaacccgcacccaagcccgtgcaatggccaccaacggtcgcaaagtggtagacaacggggctcaagctgaaaagcgctgggctgtcaagctgaacaaaaaggaggcgaaataatggctaagtctgtcagtgtagatcgcaagcgttccatcctcgacgaggcgaaagacggtagctttttcagtgtggaattcgtcaaggcagacggcaccgttcgaaagatgacgtgcaagcgccagattaaatcggcgtatgctaacggacagtatgccactcgcaaaccgaccagcgctggcaagccgcacctgtataccgctgctgaggtgctgaacatggaagagggtaaatccgctttccgtacgatcaatctcgaaacccttatccgtgcgaaggtgaacggaatcgagtataaattcgattaaaagcttgacagcctaggccattcctgtagaatggccctcaagcaagacaaacttaaacagaaaggagattaaaatggcacgttctatcaaggcttccgacttcgattccgcttaccagttcgaggccgccaaacgttccgaacgtaaagagtcccgcaaatcgcgtgacaatcgcaaagctagccgaggccgagctttcgacttcagtagcgatatgtaaggtttgtgccctgccggcaggcttaaatgccggcaatcctaagcccattcgtcgagtggttttaggattctcaaccccagcggagataccaaaaatggttcgtcaatgcgtaccctgtcccgatgctcgccatgctttttgccttgcatggttgttcgccatgccggagttcgccggtctgcccgctcaaaaggacataaaactctttaagacttcgggacaatgggcggtatgttatggctagacgacagcggctcccgtcgtgggttcaagaccagaccgaggatgaaacgccgctgagggacaggatagacccctaccttagcaagcttggcgaagtcgataagctagagggacaattgcgacgggtcagggatgcaacggacccggacgaatacaacgaaatggctaaggtactaaaagcccgacgccggaagataatgaagcaacgtgcccgggcctacggtctgccagaggatgagcctaccaatgtccaagggtacagcgtaccggaagaggttcaccgtagagccatcctgttaagcagtgtaaaaccttggatgttctggaccatcctgtctttctcgatttttgtgtggtttgttttgaaaaacagttgacaaggttcccgcctcctgtagaatggtcagcaagaaaggcggacaggccgcctagctagataaaggataaccgtcatgcacttcgttcttaacctcgtttccaaaaacagcaaaaccggtcccatgcctgttagcacgtctcataacggcacctgcccggatgcctgccctctcaaggctaaaggctgctatgccgcttatgggcctactgctattcactggaaaaagctaagcaagggtgaacgtggcgtagagtggaaagagttccttaagcaagtgcggtctatctcccgtggggatttgtggcgtcataatcaagctggcgatctcgtgggtcaggatgacgttatcgatgggatcgccctgatggaactggtgaaggctaacaaaggtcgtcgcggcttcacctacacacattacccgatgaacaatttcatgaaccgccagcacgtattgtcggccaatcgtagcgggtttactatcaacctgtcgggcaacaatgtagcgcacgccgatgaactggccgacctgaacatcgcccctgtagtgactattctcccgatggacgcggagaatgtaagctttacgccgaaaggacgtaaagtggtagcttgtccggctgagaaaagcgacaaggtgaattgtaagtcgtgcggcttgtgccaagtggccgaccgggagtatattatcggcttccgtgcccacggcacagcaaagaaaactgtcgatctcattgctaagggttaacacaatggacgaatctgtttacgcaccattcaatcagtgtaagatgatgggcctagaacgaaccgtgcggagcctagcggctcctaacgggtgcaaggtagtcttgtatcaggaccataagaacaagcatagaatcgtcatatacgatgccttagggcatggaatgtctggggtcatggtgcaagcggatggggaaattcactacaaggaaactcgcaaggctagccaagggcagaatctgacaaggcagctacaagctcagctaaccgcatggggagtgaagtggttcccctctcagtatcagacagcggcgggcgcggcctgctacaaaggaggcgagtgatgcggcagcttaacaaatcccagcttaaggccttggggcctaagatcgacctagccttagagctagcttctactggccgtggtggtctaatgaatggccacggctctacctgctacattgcaaacaaagccgggcataacattctgcgggttagctaccataactcccgattcgttgcatatggtgctgagagtgtccgggtgactgggaatgtcattgcagcatgggtggaatggaagggcattaaccgggctgcaatcaacgctctgagtgagtacgggtatcatcctaacctgagcatagggcacaacgatgctcttaagactctgcgtgatatcgagcgttaccagtgacggcctcttactcgacagagaaacggggccagaggtgggccatcatccgtactgagcccggttacagaggtgaccgggtgaccgtgctaggattctgtatcaatcaaacgcacgctcttaaaacggtagccaaattccgggcttggcaagcgctaggctggccctacacactgaaagatgacagaaaataaatgcttgacagcctaggccattccagtagaatggccctcaagcaaagggaatcaccctaagcaatcactaaaggcaggaacaatgaaaaccacagagcaacggcaagcaatactccccggggccgccggcagtcaagcgacgggcgcctactacccgatttactgggatgaccggggctacttcataggcccgatgcgtcactggaaaatttacaatcgctgcgtctgaagcatcaagccatgcttctaataaccaaccatctggagactcaaaatgaaagctgtagcccagttcaaaagtgaagactacgaaagcggtgatagccgtactgctaccgtctatgaggatgtttatggatgctacgtcgtgagcgttttcggaactagcttgagcgaacctgtcagctaccattggggtccgttcgagtataaagaatctgcaatcgatgccgctaagtctgctatctaactgaaaaggggccacagaatgaaaatctccgctattctgaaaaataacctgaagttttacaagaataattcgttcatgtgcgctctggcgttcgataatgtgtccagaaataaagctaccgaggtgcaagaatttatccatcagctactagggcccttcgttaccttgcacgctaagctcaagaaagagataccgggttacgaaagagccgtatatgatgatgagccagaggatgaaatgactttctttgtatcggatagggcctatcaaatgcgttgcttgtggtgggaaactgtaatcgaacaactagaggaacaagggcaatgactcaagctaactggagcaaaggcgtccgggttgtcggcggaaagcgggatggtgagattaccctgttcacaagcgcacacttcagtgaatcgctaggcttatgcgagggtgatccttatctggtagaggctttgccgatgcccgccgcgctccggctgctagtcaaatggaacaagctgtgcagccgaatgaagcttgactatcggtatgaactgctgtagtctgcaatctcaatcaaaacaggaatgctccaatgtcgattctagccttaaccctgaccctttgctctgccgttcaatgtgatgattacattatcgatcactcactcccgggacaagccgcagagtgtaatgctcggctggtggaggaggccgaggagtggggcgatgcttgggtatcaactaacgctgatgcccgactgacccgctaccttagccggttcaatattcaagttgaccctcgctttgttttcgactacgattttacctgccaactcatcgcagaggatgaactaccatgaacgcgccccatctttccctcaagcagtaccgtcaacgtgccgctgtcatcgtccgccgagtgaaatactatgaaaggcgctggctccggaccgtagagtttttctcaggtgctgccgctcagaacatcgcagaacgctttgcctacgctgggcatgctgaagagcaaatgaccaagctcaaggctgagtttgcagccttcccggtggaggtgaggctagatgctctaggttggatcaattggaatactcacaatgacggcctgctagaggagtggattcatcaggaaaccgaccgagccatcatgctcgaatatgacgaaaccacgtggcgtcctgtagcttgctgggaaaccactgtcgatgctcttcccaagctggcaatgctgtaaaatatcgcccgttaggctgaaataatgcttgacgggcgtttttgtacctgtagaataggcctcaagaaaggaaaacagccgaaaggctcaatctgaaacccggagatcgataaaatgctgctagttcatggaaccactgcaaaaggcctgaaagctatcatgaaccgtcgaggcaaggagggattggccgcaccttgggacgtttcggaccatgacggaatgtcctacttttacaacgtaggcaagatggagtggcacgacgaagaggagtatgctaaggcagaatgcatcgttcgttgcctagaacaggcccaattgcagcaggctatgatggccgaaggaggtaaaatctatgctctggtggttgacattcccgaagagtttcaggattgcgtagaggatgattattcgtgccctaacgctagccaccaagctagctgttttccagaggataattttgatccggcatggattgtagaagtgtatgaggcagatgtgagtgtatgggccatccctttcatcgtagccggagtctcaggtaattctatgttccaatcccaccaactacctgacaaactggtggcgatagcggagtcggtggcgcggtccagtgacatagacacatacgaagctttcgagatcgaccattcacaggtggagctatctattctcgaaaatttcaaagataacgcttgacagtctagccaactagcgtagaatgcctagccaaggggtgcataagcgccccacctcgaaaggatacagaaaatggccatcgttgatcgaaccgcaggtaatgaaagcccgaatcactgctacatcgttactggcagcattggaccagagtttgagccgaccctgttcactacccatgcgctggcaaagaagtatgcccagcagatagtgaaatacggtaaagcaaacgacgttttcccgccttttacgcctgttatcgagacccggcacaaggcagatatgaatcggttcactgttcacaacaaaatccccgaataggagacgtatctatgaaactttctgaaattttccaaaaaggcctgaactatgcaattgagtacggaatgccgtggtatatgtgcatccgtctccgggagattcatttgttcccctcgcccgttgaaatggcagttaactcggtcatgatgtctgccggtatctcatcaaccccagagggatgcgaattcgccggcgttgatgactatttcgaggaaagcggcctagcagccgcatacaaaatgaacaatcaggaaatgtccgaatacgggcgctcatcctacgcaatgtgggtgcaattttggttcttcgtaatctttgacttagcccgaaaagggcagtagaatgcattacaagcgtagaacagccagcaaataatgtgatctagagggacggtcatgggtgacaaaactgtagtttatcgggtggagtgcaggaacggcgagggaccgtatgttaactatggtatggagattgatacgtcctccactcccgagcggcccgtaccggagcatgacgggatacctgatgttcgccattttgagtatttcgccttcacgtctcctaaacaactagatgactggttcggggactactacagcaatctgaccgagcactccagcgcctcaatcaaaatgtatgaggtggacaggcagcatgtaaggactggtctccggcagtgtgtattccgcagagatgcggcggtttgcgtcaaggaaatgactattgaccaatgggtaggcctgcttaaggctggcatgatctctgcggtagtcgtacaagctctggccccgatcccagccgaacaactatccctagacctaggggacgatccggcctgtgaggctcagaaagaaattttgaaaatgttcagtttatagggttgacagcttgggccattcgcgtagaatggccctcaagcaagacaaaccacaaacccggagactcaccatgaacaagccaatgaatactttcgcatacgcccactacgtcgcccgcatggacaaggcctctggcactagcctgccctacgccaccctgttccgcatcgccctgcgtaacgcctaccgcaagccgggtgtccgccagtacgattgtgcagcactcgtcgaggatatcaaagcgcgtgaactggtccaaaagcgcattcgggctgaaaaagcagtagtgatggcggcagtaatgcgtgcaattcgtaccggcttcaccgttagcgtgaaagatggcagcgatggcgagtgggtagtgaaaaagtctaccgatatcaaggaaatctctgatagcctgcaatctaccgacgaggatatcatccgcttccgcaagggcgacggcccggacaacatcgtcggctctatgtgggcaatctacggtaacagcgccggcgaagtgatcgccgactggactgataatgccaccatggccatgattatggctccggctgagcggaagatggaaaaatacgctgaattaggtatctaatgcttgacggggcccgaaaagggccccataatgcacccataccagcaaacaacatcaggaccgccccgatgagccagatcaaaatccaagagtatatcgtagccgagatcaaggttaaccattgcgctcacctgcgcaagggccagaccatccaagcccgcgatgctcgtagcagtgaaaagtggattgcattcatggtggaacgcgggtatagtgcctctgaagccgctatcctgttcaaagatgcacatgatgtggcaatgctcgaactggcagcctgaaaaaatcctactaggagtactgacaaatgaaacgccaatatactgattcctaccagtgcaaagcaatcgacggcctgatgtctatctgcggtggtaagaaagctatcgtacaagtgtggccgtccttgaaagcctctcgaaaccgccggctgaaaaagatggtaaaatacattgcccggtcaggatggaaaccgtaaccaactgattatcacagccccggcttgccggggctcacaataggagataaaagcatgaataccctgattatccgtttggattccgcctacagcgttcaaactgtccgtagtttccttatggaagctgtagagagtattcgaaagcatatccgggactacgcggttcatgacgaatacgattcgggattgagcccggtagcacccaatcatcgacttgcaatcgtcaccttagacgaagattgccgagtgtttcacattcaatgcgagtcacctgatctttatctggcgaaccctcggatcgtgtttactgatgttgaaagcccggcatataccactcccgtgaacgagatcgaagagtatagttacatgaccgcatggcagcatatacgtcaaaaagatatgacagcaaaagactacctgtcggattggtctatccttttcgcctcaaaggagaatgccattgatatcgacctgcgccccaatctgaaaacgcaaatcttgcattaactgagggagctaggatgaagcttcgaaccatattcgaaacctacgattgccgagttaggtttgtcaccataaccggcgtgtttgtggaatctcaaattgtgcggagtttcggtcaagctcaggagattgtatcactcctctgcaatcccgcagatactggtatccgtctatccttcttcgacgaagaggagggctgcgagtcgatcctctgccgattcaactacaaaggagaaatcatcaaatgaataacaagtataaggataacatcattgcggaatactgccatttcgacggcagacggccagtcctttccttggcggcacgatgggtccaccacgacagtcgagttgtgaagctggcagcgctctttgcctgtgctggctatggccgtccttacaaagattgtattaaggcctacaaggacgccaagcagcgggaaaaggatatgcgaaaccctgccaaatggaagctgagccgagcgactaagcgggctctacgggctcgactagtggctatagaaaaactagaataatccggaaaatacctgttgacgtgaggctagagggttccctatactgtgcctatcgagacgcacaaggcgtctcctaagctagaaggactagcaaaatggcaaaggcaaatctgaagttctcccgcattggcaatgacggctacgactacgcccgcagggaagacggggtttggtttgtcagagaagggtactacgggcggtacggctgggctaaaaccaaatggactcaagttcaacccggggatggcatgactatagtcgatgcctgcctgaaggctcacgaagctggaagctccagcacatacatcggattcgggaatctggtggtattttccgacgggaaggggctccgtttaccctgaacaggaactcaaataaagttgttgacagcttaggccattcctgtagaatggccctcaagcaaagggaatcaccctgagcacctgaataggtaaaagacgatgcaagcaacctaccaagccctgaaaactctgcgcgatgcttgtgaagctgtcaaggatgaaaaaggcaccatcaacggaaacaaattgaatgcactgcgtaacaaggctgtcaaggaaatgcaagctggtggtgaaacctactctgacgccattagcatggctcacgacttgattaagaagtatcgcaagtaatcaatccgtaacaagccccgggtgaccggggcctctcataggagagaccatgaaaaacgttcaaatctgttgttcgaagtgtggagccatcaacggcggtaacagcaaacacaattgggttatcgcattaggcaagaagtggtgcggtcattgtgggtccaatctcacaacccttcgtcgctaaccattcactgagacctaatcgaggagagatcatgaacgccactctggcacgcctacagaacgaacgctgtgcaaccctccgcctgatgctgctgccggaacatcgtgggtatcagttctctggccatccttgggccgagcgcatccgcaatctccacgatgaagccaagtgcatccgcagccatcactaaaccgcactaatccattaaaactctaacagcccgccttgtgcgggctttgttctatctgcgaaagcgacagctttcaagtgtaattaacatgtaatgttgtaacactctgtagaggtaacaccagcatgacaagatagaccacttgtaacgttgacgttacatgtataacagcatgacagcgaaagctgtacagatagcattctgtccagttcacccctatcaaataaccccacaataacccacctaaaacctatcggttttaagcggcctgtaaggccgtatatgaagcgatagcttcgctatgttagtctgcaccatcaaggcgagagccttacagcatgaggcttgtaggaggttttaaggccatatgcgattagcataggatgttggttgttttaggtagatttttggtataacccctttcagcgctaccattgtcccggtgatgttaagcgacagcttacatccgctcccattttgcaatggaaattgcatacagttcatcatgcgcttcaaaagtgacttcactttgcatgcggatgcatgctatagtataccctgtgatagctccgctatcccgttttgcatggcacacgaattgcataagcatgacaagggtaaccctcgaaagcggagctttcaaagtgtaggctgagtgtgggctctacctctattatatttgcgaccggaagtagtgacactgaaaacgttgactctagcccagtaaatacgttaaactaaaaggttgatagctgccgctatcgagtaaccaacattcacacaaggaggcacaatgacaagcaacaatcatgccaagattcacatccattacgctaagcaaatctactacgccatgcgtaaacgtgccatcgcaagcgatgagatatgcaaggaatgggccaagcccaagacaggctttgaagcgttctatgattgggtggtgaatgtgtcagggtacgccgtaggctaccgcctagacaggaatatcctcttcccgggaaacaagctctatgctccgcatacatgtgagttcacacctacatacatgcatactctattcaccaactgcgacaagacaagcaataaccgtgccaacaatgatctacctctaggcgtccgcctagcccgtcatgacaagtacggaatgccagtatacgtctcacagtgcaggacactaggcaagcagtctacccttggatcgttcgacgatccgatgcaagcccatgcggcatggcaacatgccaaggtagcagccatcctcgaatgtattgatctctatcagatggaggatgttcacagtgtaaacgttgttcaagcgttgcttgaaagagtggacaaacttggcaaggatattgcacagggaaaagagacaacccttttgcaatgatttgatggggtcgatggtcaaccctctgagagtgcgagaactccgccagagtaatccgatagcgaagctatcaaacgtatatgcatattccatgccaacatgtggaaagatttcacccggcagggcgggagcccgttggcattagttttgcatagcttagctgtcgctaagaaggaaagaccacggccacccattattttggatttactaaggg

SEQ ID NO: 65 - DNA, 94591 bp, synthetic construct
  source 1..94591: mol_type = other DNA
gcttacatccgctcccattttgcaatggaaattgcatacagttcatcatgcgcttcaaaagtgacttcactttgcatgcggatgcatgctatagtataccctgtgatagctccgctatcccgttttgcatggcacacgaattgcataagcatgacaagggtaaccctcgaaagcggagctttcaaagtgtaggctgagtgtgggctctacctctattatatttgcgaccggaagtagtgacactgaaaacgttgactctagcccagtaaatacgttaaactaaaaggttgatagctgccgctatcgagtaaccaacattcacacaaggaggcacaatgacaagcaacaatcatgccaagattcacatccattacgctaagcaaatctactacgccatgcgtaaacgtgccatcgcaagcgatgagatatgcaaggaatgggccaagcccaagacaggctttgaagcgttctatgattgggtggtgaatgtgtcagggtacgccgtaggctaccgcctagacaggaatatcctcttcccgggaaacaagctctatgctccgcatacatgtgagttcacacctacatacatgcatactctattcaccaactgcgacaagacaagcaataaccgtgccaacaatgatctacctctaggcgtccgcctagcccgtcatgacaagtacggaatgccagtatacgtctcacagtgcaggacactaggcaagcagtctacccttggatcgttcgacgatccgatgcaagcccatgcggcatggcaacatgccaaggtagcagccatcctcgaatgtattgatctctatcagatggaggatgttcacagtgtaaacgttgttcaagcgttgcttgaaagagtggacaaacttggcaaggatattgcacagggaaaagagacaacccttttgcaatgatttgatggggtcgatggtcaaccctctgagagtgcgagaactccgccagagtaatccgatagcgaagctatcaaacgtatatgcatattccatgccaacatgtggaaagatttcacccggcagggcgggagcccgttggcattagttttgcatagcttagctgtcgctaagaaggaaagaccacggccacccattattttggatttactaagggttagggtagcgaggtgggttcgtggttaagtagctcggaaataaatccataactggcagaaggcgaaccagcagagggcaggcccgctccctccattattttcccagcagtagaggaggcacactctacaaacgtatcactctattcggcgggggtttaggattcgaatatacctttagcggctaaatgccatcattgcttatttcctattttcgtgctataatccttataggatgttcttattcttcattatagctggataagcgatggttgtatagattcaccacaaatagaaggaatatagaatggaagataatattcaagctccgcttgcagctagtgcaggtggcaaattcgcaactgtatacgaagctattgtcgcactcggagtagaaggggctgccgctgtgtacagggtaggtgtagggaatagattgacaacagctagaccatcggcgtggtaaagagaagccccgggcagcgaaagctgatcccggggctttttattgccttgagtttatgtatgaagagattccagttgtctctgctcttccatatactccctagtggcgtagttcatcatgaggttgcaatactcttcgtttatctggtccatgtattgcaacactttctccatgctctggcatggactaaatccattatgacggagaatcttgcttagattaccctcattccagaagtctctggcccaagcctccaaagctactgcgtagaggcttttgatgcacccgataggggatggataccaatattgctcagacattagaccctccaaacgcagcaaacaccccttgcttagctaggatagtctttagctcctccagtgaaatggtctcgtctcctacgaccacatacttgtctgccttccctagagtcatcacacacttagtctggaaggtaggccgatacaagtcatacacatcgggttgccacttgcttcgcaggccagttccgtagctaatgaaccggtcttcgggatgatcccggatgtataggcaccggggactatcatctggcccatctacggagatagggtgttccatccactccctgatcttatcaacgacgccctctcctaccttcaattgagcgtactgacagtactcaaggaacgcatcaaactgttcggcagtgaaattgctgacatcgatctctttagttttcattctcttcctccatgtctgcaatgatttccttcaacgcttgaagcgtgtaggtgccatttagctctgtagtaggaccagtgtcacactcatgaagcgtgtacgcggtcactttcttctcagtgacgaaatggaagtctacccttcggaagtcgtaggtcgatttcgagtatccaatggcctctttgagttcttcctcgtaccacaggaatgtcattggacttccgtcgcttttacgagtgtagtccagcagattatctccaacccacagtagcacttgagccttgtcgtacatgaagccgtttccgctcccaaactcgataccataagccttaaggtgctgttgtactgcaatgttctcttcgggggtcttcacaatagtgtaaaacttcaccaaacgctctttcaatttcagtcctcctgtctgtgttttatgggagtgtaaaacgttcccagtccattgtcaagccttctgtggtgatagtctgttccagacgctctctagctccttttagaatgatatcccactcatctccttcttggacccctacatacttctccatcatcagcgcacgatcaacaagcccagctctgtagttctgtcgctcttttctacgcgatagcactcttgagatatggtccttcttcttcgccaacacgctgatagctttccttgccataagagttgcatactcgctctcctcggcggtcatccattcctgatacagcagccctagacgagtgtcatgctgtacgagtggaaggtctttccatatgatacctactcgtccagtatcagagacggctttccattccagcgtagtgccgccggtcttatagtcggtgatctttacattctccgagttagattgagactggaaagcgtgcctccagtctcggtatacagtccaccgtttccagtcgaagaatgtctcacagatggctttaacaggttctccgattttaccctccagttctttcaggcggttctcctgctcagcactcatgtatttgataggtcgggaggctggatcgtagcactcctctacctgaaactcctcagcccgagactccaacactttaggctcatcgttactttcttcctctcggaaccatgcgaacagcttcttaaacatattcagtcctcctctcctgtgatagctaccctagtcagtctccacacttttctaggtagactaacgaggaatagcatagccataaacggtacggcgataggccagaatattccagctaacaccgctcgggcctctttcttacgcctctccgtactttctcccctccacccaagaaggggtcgtagagattcccatacgaacatccctatcacagagtagaacaataggcagaccactccgacgactatgcatactagaatgagaagccctacttgttccatggtgcgatcctcttaagtagtttacggctgttccagatagacagagcccacttaggtaacaacaccactttcaaaacgctgtatgttgcgtagagtagcagaaagctagcatacactgtgaatgtaataggccatagcagtcccagtacaatggcaaaagcctcgataccctctctgtgatctttagtcgcactagctgggaagttatctttgaaatactccgtgatacccatgtaggtccacatgaacgcaattccccacgcgagcgcgaggacgaatagcattgggattatctccattactcccctccttttcgaatcaagtcgaagtaggcccacacgtagaagttgcaccacgctctgcctatggcccagccttcccaatagtcttcccagtccttgttcggagggttattctcgaacatggataacacgcatgaatcagctacttcgtccaagaggtgcattaccgaattaagcggcccgattccaaaggtcttatctagccaccccttaaatcgtcccacgtctgagacggtgacgctggagtcactgcacagtgccaatctctccagaatgtagcacatgtaaggctcttcttcgttctcgaagaatgcccgcatgccttccttgattagtggtgcaatactattagagttcattttccctcctttcggatcaggtcgaaataagaccagacataaaagttcatccagttcgtctcagtgtctcttagacaattgcgatgaagataagagataactgattcccacgacgtaatcccgtgctgctctattagccactctctgaatgaccgatactctccgtgggtgatttgcccttcttctactaggtcactcaggatataacacatatatgtgtcccgggcgtttaccgagtaatcttccagtccgatctttatcaactctgcaactgatctcattgtttcctcctctgagagccccactagggctctaaatttttggttcgacctgcggtcagcacatcacaacccagttgtacaggtcggcctcctcataagctgatgggtagcgattgtactccaagaagaacgcgtggtcaatagctgagtatttggttgcgaaactcgtaatgtaagtcagaaacccgttgtcctctttcctgaacagggcgtattcttcagtaccgtccttaaacgtatctagcgagatagtatacttgtcgaagatcacagcatttcctcccggctaatgtagtagttgtagttgtcctcttggacgaggaacgcacgatagaagcctttctcaaagtctcccttgaccagcaccagattgccctccaccttgcatgtatagatatacatggtgtttgctactcggataacaggatcatccccgggacgaacatccagagcagagagcatagcctccattggcatgcttgtcaagtgtgcaactacagccgagcagtattctgcatcgcggccagaagtgtcctctgcataagcaggagcgaccccgcacgaatgcagggcgagtgtaaacgcaatagctacgagtttcttgaacatactaaccctcctcttggtctgtctggggaacatccggctttgggtagacgaatgtctctggatacttcatgcatcttagctcatctttgcagaacccgtcaatcaatttctcatgtgcgaattccgcagccttgtagtagcgattagcctgtcttgcctccactcgaaggaggtggcttatcgtgtgagcgttgatattactaagacttgcaaaaattgtcaagagcttttttgcagaaagaggaatcgacctttcatcgggtctgtaccagtccagccgggcaactccttggagaacgtcgtctacccacaacgggtagtctccgtctagctcgaccatgacttcgtacatttcaggctgaacagcgttgaaaaagaaagagggctttcgccctctgctggtatctagaggaggaacaagccccctctccaccttgtgaatcaaccgatcagcattcgcccctatccgagactttagctcctcgatctcttcacatgtcaacatacggagggcacaccttagatttctcgatagtgaacacgccttcgcatgccaggttagcaggtccataccacttgaacatgttgttgatatcgtatcgaatcaactggcggaacttctgcccgtcgcacatatccacgtcgaaccacgccacgacccatctgacgtaatcttcagggtcgttctcttctcgccatctgcactctagatcaacgtgactgggctctagaacgtaaatgtcttcgaaccctgtactctggttgttcttaagtcggatgattcgagcgcgaatccattgcatgcacctgcggtttgggtctgtgatatcgcagactaccggaacctctggaacctcaactgtatacatgattgtacctctatttgttttacaagaacgccatgattctgtctctgtctgcatggcggtacagattgaagcaaggcacgcctctagaggacgccagttgccaagcggtcctagtcccgccttctggaatcccgttgtggtctgtcttgctccagcacaccaagaacttgctaggcgtgttgagatcgattcccagcacttggaaaacgttccgagtgtgggctcgtcttgcgaacgggcttagaacggacctcccgtcatttctgacagagttccaagccggatgaatttgactggcaatgcctttagcttcttcccattcagccggcaactcttcctctggcaggatggtagctccgagcgtctccgttatctggtactggttgaagccgggagacggaagatagatttctgccgtagttcctcccttgttattggatatataatccagccagcccgattcgaacgctgagtccgctcccttcgctcctcctgaccgaagaataaaaccttgttctgccagtttacggcctacctctcgaaggatgccccactctctgtttggcgtatccctacttccgactcctgtgtaatacttcataagatcaccatttcggatagctcttctggtgttacccattgatgccggtattctccgttcttcgggttagaatattccaatagaacagggtaatactcgtctcggtaatcggtgtctataacctcgcagttccaacctacagggataggacaagaacgccccttgggggccatcttagttccaatagacaacctgccttgactagccgcctcattgacgcttatcaggctgtatctgtgttttaacgcttcaactaccttgacttggaggtctaaaagttcctcgattgtaaagtggcttacatcgattgtcatattactccctcccttccagtttcttgaattctttgtccagcttagctagatgcttatccaacttgtctagctttttatcctgataaagctggaaagcctccgagcccggggccaaccaagtccccttatacttaattgcaccccggatcatatctcctcctattacagttcgtaaacgtatacctgaaactggccgagcgtctcctcgataagaggctcgacattgctccagtcctctccggctaaaccgcagccaatcttcggcagacctacacacaactccgaggtaggaatcgcccgagcgtcagcctctgcctcaaggaacagagacatagtgtacagggcttggcccagtgcgtcaagctgagtgtagactcgtccctcttctcggccatagttgtactgcccgtacagattgtaaatcgatccatactcgttaattgtgaaggtgagggagccgagtttgcctcgatcccctttcaccgttgcttggtctgcctcgtaggcctccgggaattgctcccggatttgcttagcaatgccgctgcccatggtgttgaagcaattagcctgatgtgcaatagcgtgcaactctttgtttttgaacgcggcgagcaggtcgccctttcggtatttaatcatttgaacctctctacacttgtgaatctgacttcagagcctctcgctccgtgagcaatgtccgcgtacattgagttaatggcagcaaacggggaccaatactccttctcccagattttgaacttgaacattttgtgccctttattttctgggcgaccttgttcgcagaaggttgtaaagtaatatttagctaacacctttatcctccttatactccgttcttaatccgataacggatagatgccaagtcattgttcttcaggtcttcggtgtcccatttcccgtctttgaagaacgtccgcaaggaaccagtagcctcctcctcttcagatacattatctttcaactggaggaatcgcccattttgcaggtctcggtacactttcaggaggcctttagccgacttcttcttgctgtcagttttcgggtctttgaagattgcaatgccttcaccgttcacttccgtgtaggtagctttcactgcgaatccgaaagtatcccgggtgttgcactggtaagtgtaactgccaactccaaacactacgttcagggaagcgaaacctttctccttcaagcgctccaagattttagctgctcggcgagttgtaatggaatctccatagatcaaaccgatatgagaatcgagcatcttatagcctgcttcgttcacagtaccgccgaaggtttcccacagaacttggatagctcctttcacctgcgcctcgctcacttcttcaagtttatagccaattacatactcgtattgatcccactcagtgggaataaccttgaagtacttatcttcaaagttcagaacaaatgcatcgtttccatttactgcatccatgatatcccagtgttcgagcgactcgacaacttcaatatcacccagtccgcagataacctctacaggatcaccagagtctggacgaacaaccagcttgccgtcacgttccatgatctgatccttgatggacggcagaatgtcagtaagcacgccccagaagtcgaagctgtctgccacgtaagacagaataccactcgggaacttacccatcagttcaacaaggaatcgacgttctgcttcctcacggccacctttaccttctccatccttcatttctttctcaatgcggaggatgttactagtagctacagcgtgttcagtcgcaggaacggagcaagctaccaaaccagtcgcgttatagtagtcctcagcataaatagctgctgccaatgtgtccgaacctacgaacgaggtcaagtgaccaacaccactacgggctgcgtcttcgatcccgctcataccccgggcactgaagtcgtggaactgaacggacagcaggaagtcgtcatagcatccagtgtgattcgcgtagtatcggcccatagctgcgtattctgcggcgatagtggcgttagtcgcggtcttccaagtcatagcagaaatcagtgtttcgtggtagttcactagccagtagaactccggcagggtgttcttgatggtgagaacaggcacgcccatcggtacactgacgccttcagtcagagacttgacctccagaggcagatagccgagcttgtgtagggctcgaagctgctccacagcctccatttcccggccaaaatagccagtcaggaaccgggcataccggccaacggcgttctcttcttcagccgcgaagaagccttcccaagactctacgatctccatccaagcggcccgtccgccgacccacttgagagtgccgtcgtagaagtcggtggcatgcgtctttcgataaatcttatcggagcgaggggtcaggttgctatagacaagctgagtcccttccgagtacatggaaccgtgtccaatcttataaccatcggtggaaagatgtggcagaattttcatgttatttcctcctgttgtgttgaataggcccagactacatcaatctgggcctcctgtcaatattcgacttcttctactggcagcgtcagcacagggtagatgcatggaaggcgcagcaatggttgcttcttgctgtggaagtcttcccaaaacttatcgtgcatcgtcttgtaccgagcgtccagttcctccttggtgtcgaactcctccaccttgacaaccctcttctctggagccgaacgcttatactctacaatccagatactcaagctcacaggcgttccgccttggagtattcaaccggaatgacagtcagcgcttcgtgctctttttgagggagcgtatccgaggtgtagatgcatccgaaggaatccagcaagcagtcgatacccttactgaagattccatgagtgacgaacaggtcagggagcactttactgtactctcttagggccttagacacgcttcggaatgtagcacctccgtcacagatatcgtcgatcaccagaagcggaagttcaggatcgatatccgaaggattcagaatttcaaagccttcgattttaccggtctggagatcgcgcttcttattgcaacgaattacagcggctgctccggccttctttgcaaaatcctcggtccgctttgttgctccgatatcaggggctacgagttgatattgctcccactctgaacggctcagtaggccaccgaagaccgaagattgacggacaacttcgacgttgttaatcaggtgcagagttgcgtcgctgtgagggtccacaacgataactcggtcatatccggcagagttcagcatgtttgcaaacactttcaaactgaaggcgtcgcccggattgcaccgacggtcttggcgagcatacgggacataacccagcagaagagtcatgtgcggattaatcatttctgctcggatcgcctcggtgacgttgagaagagccatgatatcatcactattctgaatctgagctttaacgtttacgaacgcatggctttcgatgccgcccacattaacgcccacttcgccgcccgggaacgtccacacttttgcctcttgccacggacggctcataacaccttccatttcctgaaggcaacctacagcataactaatcatacatcctcctcacagtttcacagagaagcgattccgcattgcttccatcgtgctctcgggaacatcgtgtacagacttattcccatgacgattctctacaatcagagagataacagtgtagccaaactcttcagccatgtcaatgtatggtgctacctctcgctcccgggtactagtattggatacgataaccgcatctagtcctatctccatagaccgtcgcgctttgtccatgcactttttgtgagattcaactaccctctcagctttccacacatacttgccgaactccatttggtaatcgtccgcttcgcagatagacgcctgccggcctgactcccaagttttgttatacagaatctcggcaagagaggacttcccggagcccgggagtcctcgaatgatatacatgatcttttcttgcatacttcctcctttaaattcgagccatatcgaagtaggtttcgatcagaagtcgtcgctgtgcatcggtcatttctgagaaccgagcctcatccacttcatttaccaagaagtctaccagaggatagaactcttcgtcaagcgtctgcttgaatccagccgggtcttggtacatcgcattgaccttcttactacccatcctcatgataaacttcttgccgaggtagtgagttgacttgcacttcactgtccctagccctgtttgtaccatgtaaccttctttctcacaagaactcagaagaccctttgcatgttcccagctacactctatgtgctctggacgaagaatctttacagaactgtggtccgttacacctagggcgtgagagtcaagaatatattctgaaagctggcccccagtgaagatatcgcggataccgatcaaatatgccccttcttcttcctcgacaatgtgagggtcgtctggagagcatatctcgaagttatatgtgaagcctgcgatgtaatcatctgggttattcgacacatacttctgaccaagggcaacgtaatcgccggtcaatgaccccgtagtactgaagataagggagccattgtgcttagtcacggagaacatgaatccattcactttctcaatcagccgcacacggaatttaggatggaggaaactcccagcaccattctctcccagattaaacaccttctcgaaggggcgtacaatacaatcaccggagtgctggtcaaatacatgaccccgtgcctccagaagaagcgggtgcttgttccacaagttgtcgtagaataccttacgagcgtatttaataaccgacataccgttgaagtgcttaacagtcaccagcttattagcgatcaggtctttgtacatctcaatatggagtttaccttccatcctattcctccttattctacttctacaatcgggcagaatttagacttcttcgctttcaaatacgacaagaaaatcccatcctttttatcgggcctcttagacatcagtcgagcgagccgatagaagaccgatacaccatagaatacagccgctacggcaatccatataaaccccataatagccaaagtcccgcctagaatgtagccggtcgcgggtccaagtagcagtgcatacaggctggagcctataaccgatgcaaatgcgactgaactgagggctagccacactacaagaaagaccgtttgccagaaataagagcagagagtaacgctcttccatccgctggaaatgtccaagtaggtaggactttcgaatttacgatgcaggcgcatatgccacgaattcttattaatcttcatgcttgttcctccgggaagatgttgaaattgagtacgttgtgctcttcgagttcgaaagaagctaccatcttgtagcctccgagcttgtcaacgatctccagtatactctcgatagagaatttgtcaacatgctgcttcatcagattagagattcgactctgatgagtaccacatctctcagctacttcccgctgagtgaggcccgactgagaaatatagtgtgcagccactgccattacagcctttttgaaatcttgaactgggttgctcatgttaatcctccttattactcagtgtaatttttccgctaaagactcgaaactggctgatctcgaactggtcagtccagcgagcgtcttcgaaagccactccttcgaaagttccatcaaacttgacgtctgaagtcatcagtacaatgaaaggcacgccttcatcgtggatcagctctacaagagtattagccttgggtgtaataccgttttcttcacgtgaaatcaacacattaaccatattatcctctctgtccgtcatggtgatctactaccacaaattcttgattccgcatgtattctctcacttcatcgtaagagaatacctgatgatctgggtgattgtcaatacctacatcaagcctctttcctttggaaggcaagctgccgtgagtgtggccgtgtagatgccaagcaccatgatgagcagtattccacgtctcgaaagggtagtggcacatcacgatcttcactccgtcaattcgaatctccttgtactcacgaatgtcttctacgtgagagagattgctatcagcgatcaacttccacagacgagagtcgcaatggtttcccttcaggaaggtgatacggccattcaactgcttgatgatatccagcacaggctggagcttgttctttcctgcaaatgcgaagtctcccagatggtacacttcgtctacccgacctacccgggagttccaccgagaaataagctcctcagtttgctcctcgaaagtccaaggcctgttgcagtattcgatcacattcttatggaagaagtggagatcggaagagaaaaatacagacattatgcctccttttcaaattcataaatcttgttgatcctgcggatcagtcgaatagcagcccctcccagcagatgctctcgatccggtttcatatgggccattgccttgaactctgacagcatatctcggcgttcatagtggaagtctactacccagtaggtgtctgcattaatcttaccctctcggtacaggtgcccttcaacaccaagccagtggtctactgcgtctttcttcagtaactctttcggagaccacttgtctacaccccgcaacttctcgaagaaagagtaaggacgagaatagttgttgatggcttcctctacagccgactcagcctgcaatttaatgaactcccatcttgcaagaacttctttaatctcctcggtggtggctggggtgtagctgtactgctctttatattcattccacattatactgttctcctacgtagcctttgaatttgtcggaacgggttgtcttcttctgtgccttgttttccagaaccgatgcttccctttcgagcatgctcagttggttgctatacttcttgatccgtttcgcattgccactcatcacagaatttgtaagattggcaatagtgtcgcagattttaacctcttttgcaaccggatgattacggcaaccctcgatatacttccgatagctttcagctcggtttttgtcaagaatgaccagagcctctacgatatgcggcatcacgcccatagactctaagtcctcctctgtcaggtcggtatcctcaagaacgtcatggaggaagcagaccgctagaagggtgtccatgtacggaaagtccgagaaggcctgattcgggtccatatccttcggagcattacgtgctacgcagattgtatgcacttggttcagatggtaggcatacggatagttggtctctccataccgctgaccttcatgggccgagagtgcgatctcgatagcaataccgagctgagttttcatgttaatctcctttgtagaatgtgtggttgcctatcttgatggtacgcttgtacttccgagcccaccgagggagcctgccattattggctctccttacctttctctcgttcaggtagtggtccgctcctcccgttggatcaacagtatacccatacagagcgttgtatgcaacatgttttgctgtctcccacttgtcgggctccttgacgccctgccgcatgctaccatcgcaggtgtacgaatattgacatttgaagtataacactccagctacggtgctgggccacctgtcgtgctgcatcctgttgatgacggtatgagctacagcaatctgcccgatttccggctctccacgggcttcgaagtagaccgcttctgccagcagtctgcaaggctttctgtactcgcacagtgttcgcttgctttctatgatttgagcgggactggcttggaactccactacaggctccgtgccgtattttagacgagagtattccatgtcgaggaacatcccaatgaaggctagaaggatcgacaaaacgagagcttctaaggtttccataacacctccttagacaaagaagcccgccttgtgggcgggctgtatatcactcggctattatacttcagcccaagttgtaacgacgggcgtagtctttgttggggaactcgaccatcatcgactgaatgtgaatgttgcctttacgatccttctggattttggcatttttcacaatcttacaggcctgcgccttagccataagctcagggcttacaaccagatcgatgaaccctgcactccgatacccgcatccggcaggggcccagaagccgtgctgggtcatcgtcgagccgggaacgaggtacaggttgtgcagacgcacagcagtgttgaaactcagcttgctgatatgcttcgcttcccgagtttgggtttcaaaacacccagtcgtgtagttgaatttgtaagtgagagcatccatgaactgaatgacgcttcgaatctggatagcagaagtatccaagagctggaactcctcagccgcgtcgattgcagtggtcacgttgacagacttagcgttgaacattttatatcctccttattcttcagggacaaatacaccgccgattacccagccagcgcgaattagtttaccagttgggaactgagcacgcaaggtctttttgaaacgactttgaatttgcacagttagccacttaccccggtagttctcaaaattagtgatctgatccttgcgttcgtcaaagtcaccgtacgtcacttcaagcagctcttgaggtacagggtcaaacaccaccagaacagcgttcccattcttgtctaccacgtagttcacgatctgcatttccatatcgaagaactctttgtacttctggagaccgctggagcgcttaccagattcgtacaagccctctgggctgcgccacatgataccctcataaccgttctgacggtacacgtcgtgaagacgtttgaggtcttcgaaagtggagcagaatacgtactcaacgaatcgaatactccccagatcactgtgtagtgcagactggaactggaagtctaccagacgctccttgaatgtcaagccttctttcacgatatcgaatacgtgaaattccagtcgctgccgcagtccgtaaataaacgatgtgctatctacttccttaaggagccgatcatactcctcctctccgtcttcaataggataggcgtccagagctttctcggccttcatccacttgtcgtaagcatcctcccgcttaaccgcagagttgatatcttccagcacctccccatggacgtacagttcgccgtcccacacatcaccctcttgcatgatctcttcgagttctttgatgatgtgcggtacattgtaaggtttacccatgcgagacgctagcgtaactacgccattggctttcttagccatgcaacgcaggccgtctagtttaggagagccatacccctctttgtatttagcgggatcaagcggttttgcgagcatagccataacagggagatcgttgagttcttccttggttgcacgataacccttgtccaactgcttgctcaccttggactgagcctcagacacggcctgctcctctacagagcgtttctgcttaccaactcggatgttggtaacctgagaggtcatggctccatgttctttgccgtatttcacgacgatattgaagctaccgtcttcctctccgaccacctctacagtccactccttgaacccgcctttcttgtcgagtccatacagtcgttgaaaataactcattgatcctcctcgtatttgatgacaagaacatcattctcccgtaggtgcctaagaccttcgtcgagccgatattcgtgcttatagtacactactttgatcccagcttcaaccaccgagatagcacaatttttacagcaagagtgagtgacgaacagggtagccccttgggcactctcagggctgcgtataagggccctcagtgcgttttcttcggcatgcctcacctctgccttggttactcccgtttcgtcctccagcggcccgtttaagtgctctggaagggcattatacccgcaactgatgatacggttacgttttactagaactgcaccaaccttggaacgagtcgagtcgctgcacttagcgaaggcctcagcggcctccatgtaagctttaatatgcttaaccttcacacctagcctccgccgacgaggacagcaatctcctcgtactcttcagtggatgcgaactccatgtaatagtcgtccgtatctgacaggtaaacaacgataggcggataataactccatacagggtctccgtgttcgatttcagctaccctcacattgccatacactgtgcgaagagtctgtagagcttcgatcacatcgtcaatacgcattacagttggttcagtcatacctgcctcctcagttttctactttacaaacggcatcgccgcgtcgaaggaacacttgcactgacggctttccgctccacttgtcccacgcttcagctttaacactgacagtcttaggattgatggcaaccacctcgcctaccagcataaccattccagttccgcctaggcagaatgctactgcgtcgccgatctcgatatcccttcctgctacgtccttcatttgtactctccatctacacccttgattaaaataacgaagtccgaggggtcatcactgccgtaggcctttgcccgaaactcctgctcgtatttattcaccgcctccggatcacttttaacctcaagctcttggtagaggtcttccataaaccaacccaagtccgtggtcgcagccgaagccgagaggtgaccaagaagtcctaccagcatattgatctcgtcgctctccaactccaacttgtgaccgttacgttttactactttcatatttcctcctatcgcttctgtccgcgacgagtggctacgccgtaagctggcttgctcccctcgcccgtgttgtgtttcttctgcactcggctggcattgacggtgtaacgccctttgccatactcttcatctatccacgcttgggccttagctcgctgagacgtgtggacaaagatgtagtagccagatgcatccttgataaaccaagtggccgggggctggaagtccagacgtgaaaactcttcatagtcgatcacagtcaccttctgcttagccactgtatactgccccactaccgactcttttgcaatgattttatcaatcatctgagttgaaagatcagagttcttcgaggtcaatttctacctcctttcctagtccagtatctgcaaagaagctatcgagactcagagcgtggtattgagacactttgtaaccaccactcttcagaaggctgtgagcggcctcctctactttgtcctctgtcagtctccagtccgcacctaggagtacttcagctaactgctctacactcggagggttcccaatccacagacccattctactgtcaggctcgtaatcttcttcccatacaagttcccacactaggttactcattggtacacctccttcttacgaatagaatacataacccactcgtcttttcctgtcttcccgcacggaatgtctacttcacactctgcgtttacaatcaggcccgctacgatgaaatcaagaagctcctcgtctggctctggtaagcccgggtaggacgatacaaccctgcggatagtctccgatttggtattgcccagtaccccaagcatgtggaggtcaaactctccactgtagtcgtcccagagttgtccaaatatcacccatacactattcatacctagtaatcctcctttagcttgttggtgtccattaggcagcctccttcttcttgtccagcaacttcaggcatcgtttgcaggtgatatgattgcggtagcgggagaagttcttctcctcgaagtcgccatcggtgccacagaagacgtcatatggttcttcactgtccgcttctgtgccgccgtcccactcgtcgtagtgaactgctcgcgtcgccattcacttcacctcgattccggcttgctggagggcttcgacgcactcatctcgataagcttgaaggtcttcgtcgaatatgactctcggcaggtccaccctcagagccgcgcggctggctttccatgcctgccacatcagcgagtagcggtgtgctgcttctataagagccacgtatacgtggacgttatcggtcttcacaggaaagtagtcggtgttacgccactcgacaccgccgggaatcgggaaacagttttcgaactcctctctcatactccgcaatcctcctgaatttctttaagaagctcagagggcataaccgacagagccagttcctccagagcatggatgtaatcctcgacatatttccattcctttctgatcttctgaaggtacacgccttctttgctgttgtcgatagcctgaccttccagctcctgcatcagttcgaacattttgtatatcctcctatggccgcaaaaatggccggcgactactgtcccggcctgatgatactactctgaaatttcttccattgcaagtcgtttcttttcaaagaaatcgctgagcttgtcttctagctcttcgccaccgatgtaaagctcttcccctgcctttacacgctctagctccttctcagtcaagaagtcactgtagacgtgatctacccatttatcgcaccacgctgagctaaacgctgcattcctcaggctattcctgaaatcagcagatacaacgccaaaagaaggcgcgtggatcatgaaatatgtgaactggtcgatctcaacggagtcgcaggctagcgcgatggcagtcatggcagacgcacactcaccttcgagacgagcatgcactggagcttgacactccttgatcgctcggattatagcgttggcggtctctacctgtccaccgcatccgttaatggtgatgtacacttcatcattctgacctgcattttcaagggtccaaagctcctctgtgagttcttcgaggctctttattacgtatggcagaaggatggagtaacgattgctaacactttgtgtacatgaaacaggcataatacctcctttacaaaaatgggcccgaaagggcccttattactgaatcactcctcgctttctttctggccagagcccagcattgcaaagaatggaaggaggattgtgctcagctctccgctgacagcttcaccaacttctgcaccagcctgagctacactcaggaactcttcagtgcgtacaaacttgtcaaccttaacgagggttttaaagtctactcgttccaagaacgcagcgccggctgcttccgccagaggttcgaggtttacgacttccatagcgcgatccagagcttcctgattgatctctaggccgttctgtgcggcaacctgcatcagggtagacttcacagtctggattgcgtagtctttgaaaaactcacgttgtgctttgttaaacttcattcacttttctcctttgtagtacgacgacggcgggtttttggtttatcttccgattcagtctcttggacttcctctacaggaacttccttagctacttctgtagccttttcctcagtctgcttctctgcaccttctcggaccatcttgacagacttgagagcgaaattcatgttagcgaagtgcgggtcttccacatcaattcggaagccttggtcaaaggcgttctgcatgcccatcagaagactgaaaacgtcccattcttgcacaatgacttcattgccgtcaagctctttttcgatttcctcagaaacgccttcctgacggaacatctggacttgacagagggtgccatacacaggatagccttcgatggagcggacgactcggaaaccttccttcatgtgggcgtgaatcgagcgaagccagacgatagggttgtattctacgatattgataacttgcatattctttttactccttgcgggttagtgttttacaataataccacgtttctcaggaatgtcaacccattttgttctggtagaggcttgacatagaggaaatctgtggtattatcaatattcagcgtgggagagatatgtctgaaagcactcaccggcccacgcctagcgcctatgaagaggaatccacaagggcaacctgaactcgaatgctgttaaagggtggagacgacgcgaaagcggaatgacagcaatccgatgcagcctacatgctgcccctcaccgaactcatctgcatgagtaagaggaattggatagagccaaggcacgtcttaggcagattaaattctgtatggcgagccttgggacgactctatccttccctagccgaatctatctgcatggggtgttctcctgatacacatacacaaatacccaccacagataatccatcaatcaacccataaggaatttctatgagatgtaagtgctgtgatagcgaactctcgtttgagactccagtcatcaataaacatactggtaaggaggacgatctctgctcctcttgccgtaggtttgctctcaatcctacactggatcatgagtattttggtggttggtatccaagcgaaggggttaccgctcctctccctaccggggactgacattgtatatagagtgcgcgtactctgacaatatgtataaatagtagattacggtgcgaataattctttaagggcttgacaacaggagatttcgtgctataatcggagtatatggggcttacaaagcttcagaggatttaatatgactcaagaaagaaacaagggcggtcgccctacgaatgccgagctagaagcccggggtatcattcagacagacctgaaagcagggcttagacttctaaagaagagctttgcagagaacatcagattcctccaagagcaatctgacaacccagaggtctctctacagatgagaatcaagctcaagaaagagctttctgacatgttcgtcgcttactacaaagctgacattgcactcaaaaaagagcttgcaaaaggaacagaatcaggagataatgagaactctgaagaggacaagactcccggagtcgttctcgcgttttgattaattgccgcttcgttcaatggtaggacgccagactttgaatctggagatgatggttcgatcccatcagcggctgccaaatgtagtaaaagaacattcacccgacaaggaatgtgtctcgctcagaggacagcgagtaataagtgtcctccagaattaagggtcggtgagcgtaattggcaacctactggattccaaatcctcgtattctctgttcgaatcggagtcggcccgccaaattagtgttgacaggagcaaagacctcttgtatagttacaccaactgctcgtatagtgtaatggacagcacaacggtcttctaagccgtaaggtctaggttcgaatcctagtatgagcgccaaattagatggacggaagctaaaggtgccacctgggtccttttctaccgttcgtatagcatacattatacgaagttatatcacgtgctataaaaataattataatttaaattttttaatataaatatataaattaaaaatagaaagtaaaaaaagaaattaaagaaaaaatagtttttgttttccgaagatgtaaaagactctagggggatcgccaacaaatactaccttttatcttgctcttcctgctctcaggtattaatgccgaattgtttcatcttgtctgtgtagaagaccacacacgaaaatcctgtgattttacattttacttatcgttaatcgaatgtatatctatttaatctgcttttcttgtctaataaatatatatgtaaagtacgctttttgttgaaattttttaaacctttgtttatttttttttcttcattccgtaactcttctaccttctttatttactttctaaaatccaaatacaaaacataaaaataaataaacacagagtaaattcccaaattattccatcattaaaagatacgaggcgcgtgtaagttacaggcaagcgatccataacttcgtatagcatacattatacgaacggtagtcctaagaaaccaccactgctcactgccaaaataagtgattttaagtgttgacaaactgaatttttcatgttttaatacacttatcagatgaagaaacaattagcgagtagccctgagtaggtcgggaactagtctagaaaactaggccactgcgatgagcggtgagggttcaactcctttactcgctgccaaattaaggccctgtggtggaattggtatacacatcagtcttagaaactgacgccgagaggattgagggttcaagtccctccggggccaccaaattaagaatctcttttgctatttggttagggttcgagtccctacccggcgactatggccggtctatggcggccaaatagtgagagagctaggggacatgacgaaggtagcgctgctttccgatctccccggcgctataaaagttatcatgaaggggttgacaaacaagaaattcatgataatataggtacatagagtaacaaacaatgtagccgggtagctcaattggtagagcacccgaccgataatcgggtggttgaaggttcaagtccttctctggctaccagaatttaaaggcccattagctcagtctggactagagcaagcccctgtctagggcaaggtcgtcggttcgaatccgacatgggtcgccaacaaggtcgttgtagagatagatggctactatcatccggctgtaacccggacgccataggctagaggttcaattccttccttcgaccaccaaatagcgagagcgttaagactggctggcgctgtcactcggctcataaccgaacacaagtggttcgattccacctctcgctaccaaattgcactccgaggaaccctaagtggtgggttcagtgtcgctacctatctcggtaaggggaagcgcctaagctggcacgggtaattgagtagctgtgataagctactggcagccagtataaatcgtccggctcgggcccgttatagctcctagatttgaattagatgctgtaagccataggaggtgatccagtatctcccggaggggcccgggttaacaacctcatgaatttagcccgcgttggccgagaggtttaggcggcggattgcaaatccgtctcacatcggttcaaatccgatacgcggctccaaagtttattgggatgtagctcagtggtagagcagggagctgttaactctcaggtcgcaggttcgagccctgccgtcccagccaatttccaaaagagactcttcgctttagaagcagagtcgaacgcccgatacgggccttattatctcctcgtagctcagtctggttagagtgtcggatttggaatccgaaggtcgaaggttcaaatccttccggggtgaccaatttaaagcgggtttcgtatagtctggttattattcttggcttccacccaagagactagggttcgaatccctaagcccgcaccaaaagtcgtagacctcagtaacccggagtaacgcccgggagaagatgtgagttctacgtatacgcgtctgaagctaactaggtagaagcaccgggttgaaattccggaggacttggatcgttaccaagcgggcgcaccaaacaatgcagttatagattaaatggataaatcgccagactttcaatctggtgttccgggttcgatccccggtaactgctccaatcaagtccaagccggaacattcctccgtatgtgctttcagccggcttggcattatcagtgtggagattgtgcagcccggatgctgccttccggttgtgacccggttgttggggttcgagtccccgcctccaaccaatgttgtggaattgaatcacaggacgacgactgggtgagattgagcgtcctctagcccgaaagggtgttcgcgcaaggcgaaccgaagccgaaaggctgaagtggtgcccggacccacaaccaatgttgtgtaatggaactattacgttgacgctgtgtgctctccggatcgtaagccggtaaagcgggaatagcgggctcccgtagcagagtagtagtgtggttcgattccacagcacgacacctttcctcctcgcctgtgctgaacggtttcctcctcctttcccgtctcacaggctctattccctgccctttaagcatttatggtgatgcaccggctttgtaacccggcgaattctgttcaagtcaggaatggggcaccaattcactatcaaagaacccgcaagctcccgatagggttcacactctataaggttgtagcatggaaaacactaaggttcctgataaaaaactcggaccaatcgcgctagcgcttaaagaggccagagagaatttcgatctcagccctcatgttattggtccaaaatctttcaaacagaaggagttcacagacagcgatgcaaagatcactgtattcggtggtgctgctggtgctggtaagtcttatctcggtgtaatggacttcatgaaatatatccatgatcctaacttccgaggtgtaatgactcgtcgtactactcctcagattaaaggcccgggcggtctgcttgaaaaagcaacagacctattcaagctcgttgaccctaaagtcaagtggaaagacaaagacggcaagtttgtgttctcttctggtgcagttattttccttcgacacttcgaacaagaatctgacaaagactccttccaaggttgggaggttagtaagttcctagtcgacgaaggtcagcagttcacagaaggcatggtgacataccttatctctcgtatgcgtaacccgaaatgctcggttgttccgcacatgaagattacatgtaaccctgattacaattcgttccttcgtaaatggattgaatggtggctagaccctgacacaggaatcccgatccctgagcgctccggcgtaactcgctggtttgtacgcaaaggcggtaagatgttctggggagacaccaaggaagagtgcattgcccttcatggtaatcccagtctagcgcctgacgatgaagatcaggtgaagcctatcagcttcaaattcatcgcggctaactgtttcgataacccaatcttgatgctcaacgaccctgagtatgtagctaaccttgaagcccttcctagggtagaacgtgaaaagctcctagacggtagctggcacgctagagaagagggagctggatacttcacaagggactggtgccaaatcgttccccatccgcctctacgggtgcttaaaagggtacgtgcatgggacatcagcggtagcattgaatccgaaaccaacagaaaccccgactggacagccggcgtgctgatgagccgtacaaaagaaggcttgttcactgtcgaggatgttgtcagagagcgtaggttgttcggaggtgttttcgacctcattctagaaacagccaagcaagacggtcaagacgttgaaattcaaatcccatgtgacccgggggctgctggtaaagcttatgctgcacagctaattagagacctagcggatcatggattccacgccagaccgaagacaactaacaaatcgaaagttactcgattcgccccgttcgtatctgtagctgaaactaaatcagtgcaagtcgttgcgggagattggaacgaagattacttcgatgaacttgagcgattcgacggaagtaaggctatcaaagatgaccaagttgacgctacatcagatgcatttaatgctctatcccttggcagcttgattatccctgatttcctaccgcctgatatgactcaatccaacaaattcaaactaattaacggctaaggatttaaggtaaggaggtttatttatgcaggataaaaagtctaaaagtaagactgccaagattgattggtctcactggacagtgacggtccctgaggagaacccggacaagccaggtaagccgtattcactgggttatccggagattctcaattatgcagaggacaaaatcgcgtcaaaatacatgtacgacgatccaaaggacaaaagtgtcgtgttctacgcattcccgtccggcgtgactaccgctaacacccattacagccggtcagagttacgggaaactatggagaccgggtcaaacaaagttaactggaccttcgctaagggtggcaaaatgcgtggtacttacgctatcgacgacatcagcaaagagccggatggtaagtattcccgcgtaattatcgcccaaatccacggcgtactgaccgacgagcaacgtgatcttattgggcaaaaggacaataatgcccctccgattctcaaggtgtactgggataaaggtaaaattcgggtaaaaacgaaagttttaaaggacctgaacgccccttacaaagagatgcttctggaacacgcttggggtgatgacgaaggccggaactttaaagagaagattgacttaaatacacggttcacattggaggttaaagtgagcgatgggcggatggaagtcattcttaacgacaccgaaagtttggtctatgacgacattcacatgaaaaaatggggcattttcgaaaactactttaaagcagggaactacttccagtctaaaactccgggcacttttgcaaaagttaaaatttattcacttcaggttacccactaataggaggcggcgatggccgagactgaaaagacagcaccgggtatcccgcgacttcgcctaggcgagattggtagtacaggccttaaacaagtcaatggtactattctggaagaacgccgaccagaacttcggttccctagggcatgcagaacattccaaatgatggcggaagaccctaccatcaaatcagcactcgatctcttcgaaatgatgatgagcagggttgactgggaagttgatctaggagttgaccccgacgaggctatgaaggcccggggtaaattcctgaaagagtgcatgcatgacatggaacacagttggtactccttcatcaaagaggtcactagcttctacacctacggattctccgtacatgaaatggtgtttaagcgacgtgaaggataccctgtatcgaagtacaatgacaacaaattcggtattaaaaagttgccaatccgctctcagtctactatcaccaaatggttgtactctgaagacggtagaaacttcctagggtgtgagcaaagtcttgccaatgttgtcaatggcgaccgttacgtcaacctaggtaataaggacggaactgtagagattccagctaagaagatgcttcttttccgggtcgatgctaaacgtgacagtcctgaaggtaacagccctctccgtgcgtgctataacgcttggagatatcgagtagagattgaagagcaagagtccgttggcgtaacacgcgatatgaacggtatgcctacgctctatctgcctcctcgatatatgtccgaagatgctacagaagctgagagggcagtctacgaatactacaagcgagtaattcgtaacattcaaatgaatgaacaatctggacttatccttcctcaagcgtttgacccagaaagccgacaacctctgttcaaattcgaactgacctcttcgcagggcagtaagatgtatgatacagatgccatcattcgtcgctgggacaacaaaattctgcaagccttgtttgccgatatgctgaagatgggtcaggaccaagttggctcttactctctagctggtgccaagactaacatcatggctatggcgattgaatcgcggctccgcgaaatcaaagacgtactagataataaactcattcctacgctgttcgcactgaacggtgattatagtccagacttgccgaagctgcaatacggcgagctagatgaaatcgatcttgaagagttctcgaaagggattcagagaatcggttctgtcggtggtcttgaacgtgaccgtgaggtttacaacaagattcgcaaagctctcaagattaagcctcgaccagacgacgagcctgttgatgtggataatatcatgggtggtcagtctcaagcaggtaaagctggagtaggtaatggtgcatcaacatccgcagccggtagagacaacgccgctgcaaataacgcataaggagacagaatgctgactcttgaaagtgttattgaagctctcagcaatgctttcggggctcccgccaaggcggaagaagccccggctgtagaggtcacaaagtccctagacaatgaaaagaggatggctttgtttgtcgttcttgagccccaagaaggcgactccacgactgacctacacgcagacacctactccgaagaggaagtagagaaagcttgcatcaacttcaatactcattgcaacgtagctaatatcttccacaagattgaaacacaggaagctgagattgtccagtccttcatcgctccatccgcattcacaactgacgacggaagagagatcaagaaaggtacatggctccagtggtggcacttccctgaaggctctgaagtagccgatgcactatgggaaggcgttaaatctggtgaattcacaggcgtctctatcggtgccagagctacagtcgaggatatcgaatgaccgtaaaagcaaaacgtaaactgaccgatatcaagtttgaacacgaaggtgctcatgtcgctctggtcagtaagctccaaggtggtgcagccaacgggcacactactctaatcacaaaagctaccaatggcgtaactgaagagcttatcgataaagctgctgaagttacagtcacaatgcagttccctgagttccttcgtaagttcttcgggatgtattatgaagatgccgaagttctctctgttgccatgggatatggcagaacggagtatccagaactagatcacaaagactggatcgaccagcgggtcgagtctatgtccattcttaagtcggtttataaatcggctgacctgaatcaagctctctccgagcttacccctgagcagaccctttcccttaaacaggatcaggaactgcttgaaaaggctctggaggtagtctccgagcaatccaatgaaaatccatccaaggagattaccaacatggaaactatcctgaaatcggcccacctagaagctctagctgacgctattgcagttgaaaaagctgctggtgtcgctgctgttgcagaagttcagaagcaactagacgccgctaatgtagagcttacagctcttcgtgaaattgtcaaggctgctgaggcagagaaaaccgctgctatcgctaaagcccgtaaagagcaactggctgaagtcctcccggctgaccaagtagaagatactttcaagtctctggaagttctggacgatcaagcttttgcacaaacagtaggaacgctccgcattcttaaagctgctgctgaccaaaatgacatgcttgtcgagaaaggtgtatcgggcgctggggaagaagacgactctgttgtcgccggtgttgccgctatcctgaaagctcgccacggctccaagtaatatctagccaatctagaggaattccaaatggctcaaaacattatcgcaaaagatcatcagcgtcttagcaactggctgaaagaagaacaaatgggccaccgtggcctgttctacactcgcgaaactctgcctgtcgctgacattgatgttaaaacaactggttctgtcctagacagcactggcaagctggtaactaaggctactatcgccgacgctacctacatcctaattaccgacctgcacgactatgccaacgctcagatgagccacgctgtcgtccttgctcgcggttttgccaagatcggctccaaggctgttatcttcggtgctgacgttgacgacgctgataaagctaccgtctttgaagctttcaaagccaagaacatcttcgccgttgaccagatcgaaggcgcattcgagaacgtcaccttcgcgtaagcgagggtcgttccagtaaataaacactaggagtaactttaaaatggctaacacccgttcctacctaaacgatggtcagttctacattgccgaccagactgaaaacctgcttatcatcccgaacacttggaccctcgtcgagaacatgggcgtcttcacaagtgaaggtgtgactcagaacactgtccagttcgaagagatcgaaactcgctacggtctggttaaggatgccatccgtggaactcgtcaccaagttgctagcgaccaacgtcgtcaactgcgtgccttcgcgattccgcacttcaaccaagacgactacatcactccagaagacattcaaggcaagcgcgctttcggtgctgaccgcgaagaaactctgaacgaggttcgtgctcgtaagctggaaaccatccgtcgcaactgggctaacaccgctgaagttgcttccgttagcgctatcgtaacaggtaagagctacgccccagccggaaccatcgagtacgactggtacgacctgatgggtaaaactcgtaaggttgtcggcttcgacctgaccaaccctaccgctgacgttatgggcaagaccgaagaaatcttcgtccatatgcaagacaacagccaagacggtctgatccgtggtgacttcgttgccctgtgctctcctgagttcttcactgccctgattaaccatccgagcatcaaagagttctacaaagcttaccaagctagtcctcaatactggcgtgaacgtctaaccgctcgcggtctggaccttcgcttccgtgagttctacttcggaaacattcacttcatcgaataccgtggcgttgacccgtacggcaaccgtctgatcccggctggcgatgcttacttcatcccaaccgacagcggtgacctgttcgctcgttacttcggcccgggcagcactttcgatgacctaggaactctgggtaaagaactgtacgctaccgagcgtatggctgaagaccgtcgttcgatcctgatcgaaaccgagtccaacttcatccacgttctacgtcgtccacagatgatcgttcgcggcactgtgaatgcgtaaagacttcagggaggcttcggcctccctttcgtcgtaggagggtaccaaaatggcttacactggtgatccagcaaacaaccctatcgaccgtctacgagagattgtaggggacgtgtgggagcctccgatgctttccgacgaaacctatcaatgggtgttggacaagaacgaaggcaacgaaagacgagccgcacttgaacttatgcgtatgatgctcttccgcctgacaaggggaatgagagaacgcacaggtgatatcgaagtatatggtgctgagtatttcaacaactacttgaaagctcttcagctcattctcaaagacccgaatattgcaatttctttggccgtgccatatgctggcggtatctccaaatcggatatgctggctaatgacctagaccccgacaacgtaacacgggaattctacatcggttttgcaagacgggagaagctttacaaccagtgcaaccccggtcctcaagaccttagcatggggtgtgattatcttggcaagcttcagttttaaaacagatcgccgtcgcctcacatccttgattaagagggtggaggctctagacggaacaacggtagaagttggtttcttccccgaggaccgatatggttctgaaaatggaaacctaccagttgcacaagttgcagcttacaacgaattcggtactactcgcaacccaacccggccattcatggctccaacctttgaagaattcacatctcaattccactacgcaagactaatgaagtccacgttcgagaacgtcctacgcgatggaaggcagacgaatactcttctgaagaaattgggtaaaatggttgcagagcagatgcaagttaacattgacgactatccgggctctaacagtccggcatgggcagcttacaaaggatttaacgatcctctattccatactggaaagatgcttgagtctgtcaagttccaaatccatcggaggcaataatgctctatcctaccttctccatgaccaacttcgtaaagctagatttgattagaagagggcagcccggagacgacggttttggaagacctacccctccagttgagacagtagtaacaatcacagctaacgttcaacctatcgaaaaatcgacagacactcgtatccttccagaggccgacagaagcaaggcttgcttcaaggtgtactccagaggcgaagagattcgacagttaaaggaaggcccgggagggtggagtgccgatagattcatgtgggaaggagagttgtatgaagttatgaaagtcatcaactattcgatgggaatcctaaaccattacaaagcaatttgtatgagagtagagaggaatagcacagcatgatccacacagagctagaaaactccctctatcttatggtcaaagagttgttccccgactggcgtgtaattcaagcttacacgaataatcaggaaccgcaaaccccttatctggctatcgacattaagaggctggatgaactgggaagggaaaatgtctccaatatgagcgatcccattagtccttcgcatggaactattcaagttcaacaggacttcgcagccaaagtcgtattcgaactgattggcaagtatggagagacagcaagtgtctctgacatggcaatggcgattactcgggcaatgcgtactccagcaggacacgccgcccaaagaaagtttaatctatcccttttcaaactccctagcacaagacgagttcctatgctaagagaaacagatatgtacatgttctatcaagttacatgtgaatttggattctctgttatagaaaccacaactcaagagtttgctgctggggctgatattcacggcgtttattacgacgctggtcgcccgggtcacattattgagtcccacatcgacataaacttcgaacactaataggagacaggaatgactgttcttactgatgtaattgacattcagatcagccgtgagactgctgctgtcgcacagacaaacttcaacgttcctctgttcatcgcttctcacacaaacttctcggaacgtgccagagtctacaacagcctgaaaggtgtcgctgaagacttcggagaatccgatccaacatatcttgccgctgttcgctacttcggtcaagctctcaagcctcgcagtctagttatcggacgcagacaagttccttctgctaccgtctctgtcagtgttgttcaggaaggacaaagctacgtccttaccgttaacggactacctgtcagctatgttagccagcaagacgacactgctactctgattgccacaggcctaaaggcagcttatgacgtaactccggtagccggcgtaaccgtcacagacaacgaagacggaactctaaccgtcgcttctaacgaagactggagcctgaaggtttcttctaacctgactatggctgctgctccctctactgaaggttggccggctgctatcacagcagttcaaggagaaaacgacgaatggtatgctctgagcattgacagccacgccgatgatgatatcatggcagtagctactcatatcgagggcaccaagaaagtgtttatcggagccactgctcaggctaacaccaagacttccgcagagaatgacattgcttctcgtctggttgctgccgggttccaacgtacggctctaatttaccatccaaacgctgacgctcaattccctgagtgtgcttgggtaggataccaactgcaagagcaaccgggtagcaacacatggacccataaagctctagctgccgtagatgcttaccgtctaaccccaaccgaatctaccaacctgaagaacaagaacgttaccacgttcgagcgcgttggtggtgtcaaccgtacattcggtggcgctatggccggtggtgaatggatcgacgtaatgattttcgtggactggctggaagcccgcatgaccgagcgtctgtggttccgtatggctaactccaagaaaatcccttacgacgccgttggtgcaacaattctggaatcggaaatcagagcccagcttaacgaaggaattcgtgttggtggtctggctgaagctccggctcctaaagtcttcgtacctgatgttctatccatgtctccgaacatgagagcacagcgtatctttgaaggcattgaatttgaagcccgtctggccggtgccattcacttcgttcacattcgtggaactgtgaccgtctaaggacggtccttcccataaggagattactaaatggctgttcaacgtctagcgacattctctccggctgatgttaccattgttattactcaccctgcaactggtgagagcatggttctcggcggattcagcgaagacagtatcgttaacattgaaagaaacgctgacacttacgtgatgtataccggagccgacaacacatcgactcgcgtctacaacgcctctaagtctgctaccctcactgttagccttcaacaaacttcgccttcgaacgacttcctgactgctctttacaactacgacgacgcccgtcgttcgtctgagggattgttcacaatccacgttaaagacaactctggtcgttccgactacttcagtgatgacgcctatgtcggtgttgttccgggttctaacttctcgaacagcatgcagacacgcgattgggttattcatgcacacaacctgcaaactctaatcggcggtaacgccaagctgagcccgggtgatgcggatactcttcgtaacctaggtgtcacactagaccagcgctggctgtaatatagcgcttatgccacatcgacggggagctgccttaacgggtggctccctttgttgtttctggaggatagaaattgattaccacctactcgccgcgtgacgtggttgtaactctcgctggtatccattccgtgacagggtacgcagagggagagtttatcagaattgtaaaagatattaagcctttcatcaagcacggttcgatggatggtgaaatcgcaagggtctacaacaaagaccaaggctggcgagtagagttgacaatcatgcagtcctcgccgaccaatgatatcctttcgatgctttacaacgtggacattgcaacccgaatgggaaaattcccactgatgattaaggacacgaagggttctacaagcttcctagctctgacagcatgggtggaagacctacctagggtatctttctctggacaactggagacccgcacttggattctagggtgctctgaggtcgccatgaacattggcggaaacgtcgatcaaagtttggtcgagcaagctatcctgctgggaagctctcttctgccagcccttacgcaattcggaggcttctaatggctaacacggtattgacatatagcccatctgatgttaaaattgtcctttgtgggtatgctctcactggtgtagtttctttcgaaatgtcttggctttcgagaccctacacaatggttcgaggaatcagagggcaccacacccgggtcttcaatagagacctttctgcgcagattagaatcgaggttcttcagacttcggtgtctaatgatgcattcttctcgctagtagagcaagaccgaagaacacaatccgcccgaatcaccttgtctgtcaaggatacccacggtagcaccatgatgagcacagacaacgcttatgtcaatggctaccctagcataacattcaccgatggaatcgagaacagggtctggactattgatgttctggactggaccgatggcacggtaggcggaaaccagcaagtcggcttcgacgtgtttggaactgttcaaggcgctcttagctacctcagataaataaggagtatttatgttcggaaaccaacgtactgtcatccacaatgggacagaatacactatcaaccttctgccagcaactcgcggtatcagcgtactgaagcagctaaccagcttgctgggtccatcccttgccaagtatcaagctgaccacgacttctctggagccatgaaagaactgttcgataacatcgacaaggttcctgttgagaatttgatccagaatctgatgctgacagttttcaaaggttcgatggcaatcaatttcgacaccgaattcgctggcaagtatgacctgctgtacgcactcacaaaagacgtgatcgagttcaacttcggctcggttttttctctaatcggtttcgcagaggcaccgacggtataaagaccggggatgggcagtccgagacttcagtcactactgatcgagttcagagtgatcggagggttagggaggcccaccagaagttctcgcagcattgggagatttatgtggctatcactcaccctctcaagctaacgacgtatggggaactgagtacagtcctcactacagaagatttgtacaacatccttgaggttatagacgttcacgatactatcactcaagtggcaaaagaacacgcagaggctgataagaaatgattacagaaaggattgcccagctaactggggaacttaaatttacagtcgattcccggcctctcactgcttttgacaagaagctcgctggggtcgaagcccggctaagagaattctccaagctgacgaacaagcggtttggagttaagctaactctagatacaaaaactctgagagaggagcttgccaaggcagccactcaaagggtagtcttgaagaacatcgcggtagatgctgccgctgttcgtcttatctctgagaagcttcaagaaagactgaatgcaacgccgatcaggttgaagtctgttaggctagaccttagcggtatccgagatcagaaaaacttcgtaaagacggctctcggccagaccaaggtcgatctaccggttgaactgggcttggctcaggctagccgtacgctgtatgaatggaagaagcgcacagagagtcgttttaaaattcatctgaatgcagacattagccgctctaaattgctccagaatgcacgaaacacactaagggatgtgcagggtaggctaaacggtcttgctgtcgctacgcctcaaattaggctgtctgtagaccgtgcccatcttcgtagagagattcaagatgttcttgagcaaatcagacgcgaagtgagaatccgcattgacctagagtcttccatccgaggaggtggtgcaggtggatcgagaggtactgccggccatatccgtcaaggtatgggaatggggattggtagcgagctagccgggtggggacgcgggtttattcccggccttggtggtgcgttcgctattatgcagcttaaccgtgctaaccaagaactgcaaggtcaacgtctggccatgcaagctgtcggtggtggagtacagggtggtcaagagctacaagccaccctccgcgatatctctcagcgtctcggtcttgacgatagagcaataggtagctcctatgttaagatgatggctgccggacaagcatccaacttcgacaaaacacaggttgatggcatcttccaatccatggctgaatatggacgagtgatgggtctggacggggaggctatgaaaggctccttccgtgccgtagagcagatgatgggtaaaggacagatcatgtccgaagaattgaaaggtcagttggccgaaagattccccgctgctgtagctctgatggctaagtctcaagacatgactatcgcagagctaatgaaaaccatggagaaaggggagcttaagagtgatgctctgatcccattcgccagaactctagcggaagaagctcgtaaaggtggcgctctggacgcggctatgcaaggtacagccgctcagcagggccgattccagttcggatggaaccgcactatcgaggccttcgcggctggaggattcgaccgaggaatgagcgacttcttcaagattgctgcccaaggcatgaaagaagcgcttcctctggtaactgcacttggtggcgggttcgaagctcttatgaggcctgtcaacgctctggtcggtattggaggggagcttggttcccagtgggagaacattgccaagcagttcaacatgaccggcacagggctgactcttaccacggctcaaaccctagccttgctgacccctatgggcaggttgatctctgctattagctggggtgcgttggcactggaagacttcattgtcttcttggaaggcggtgattcggtgttcggggacttcttgaacaacaacgtacaagctgccgagacattcgaaaagctagccagtgaatccagtgaactgaagaacaatctcgacggtatcttctctgttgtcccggggctagctgaagcgctcaaaggtctagagttcaatgaaatgctggtcagcacgatgagagaacttgctgccatcatggagttcttcaacagtgttgtagagagattcgcaatagccggcaagtacagggacgctaagattgctgaagccggaggagacagaagtactataatgtcgaacatcgacacgatgtacgctatgttcaatccggaagatgcaaaagacaaggccaccttcatcggtgacaggctagtagctcagaacattgacgcgatccagacagagactcatacccgtgcaacccagtccttgactccagaccagtttgggtatatgatgcaacgtggtcaagttagaaacgaaatggagggtgccctcaagaagagtgccattgacattagtttcaacctcaatgtttctggtatcgatgctcagggtaacgtcatgacaactgaagcgcaagagcgagtacgagagatcgttagtaacgttcttgaggaagaaatctccagagcttcggcaagttataaggaatcccaatgacaattgctatcaaaagagagaacggagacctaatctggttcgacgctgttacagagttcggaagacagtaccgtggctctgtgagttccaacccaatcgaaacgggaggaaaaatcacagaccacattactacagaaaacccagtcttcactcttacagccgtcgtatcagacgcagacttcaacttgaacaggcccgttatcaacgacaacgaggcccagacatacaagatcaacaacaaagagttcgtgaatacgcagccggtaaccatcccggctgttatctcaacctctagactagaccctagcagaatctttccagaagttatcactcagtttattcctcctgagattccttctgcaactgtcctccctcaaaagggtgataaagtcgcttatgatattgagcgccaactgatcgacatgcagcgtaatgctgaggtcttcagtttgctggacttccgagacggtatcatctgggatcaaatcgaaagatgcatcttcaccgacttgtctttcactgaaaacgccgagacaggtagcagccttcaacctcgtatgacaatcgaggctgtgacattcacagatactcgttatgtcgaggtgagggttaacaagggtagaaagaccgctaagaaagaaaagagagacaccaaagaaggtgataccggggctagcaatgctaccagccaagactctcctacattcaagcgtagtcaaatgaaagaggctcagattagaactcaggttgcgaggtagactaaatgagcacgacttatatcgacacacttcctctctaccaagaccggaagtacagatacgcagtagctatcgagggaatctcaagagtccttcaattctactggaatagccgctctcggcagtggcacatggatatattcgacgaggaacttaaccctatcctgacaggactggcggttgttcctcagtatccgatcatggcagactacgccatgcaacatataggtttcaatggctacttcctactgatgcctgtcaacctagaacaggtacagtataagcacgatgcaagtgacattgtaccacagtttttcgaactgctatacgtgaacgttgacttggaggatgacgtagagtgaaacaatatgacagagtgtataaactaacgctcggtaacactgaatccgggcaaggtgtagagattacaaacctccaccctgacggaagtttgaacagagagggacttcagttccggtttgatatctctaaaagttcagataacaagaagagcggaaactcggcgactgttgagatatacaatctgtctattgccactctgaacattcttgaaactgagtatctgacgtgccgactagaagttggttataaggaaatgggaacttctgttgtgcttgatggcaacgtggttgaaacttcgactagaaagagtggtaacgattatgtcactcagcttattctaggtgaaggatatacagcactaacagagaccaagctgaagggcacagtatctccgggcaaaactgtaaaggatgttatcgaagaaattcgtcttcaaatgccgggagtggacagaggagcttatacaggcctcaattgcaacaacccgatcatgtatggataccaactacgtggactggctaaagacgcactaaacagtgtgtgtgaagccaacaatattgaatggaacatcagtggaaacgttctaaacgtcacagacgttaacggcccaacaacgaagagtgttcaaatggctcctctcgtaaacagagagaccggcctgattgatatcccattctacgccagtgccagcggaacagcacagaagaaagaccagcggagacggaggggcgttcaattcaaatgccttctcaaccctgagctaactcccggggttcttgtccgggtagagtcggacagattgtcaggcactttcagaatcaacaacgtccgaatctcgggcggatacagagacaacgaatggtacactgaatgctggtgttccgatcttaaccaagaggatattgaccaatgaggagaacaggcctacaagagcttctgaacctgcactcgtccacagagggttcgaagcagtacactgccataccttgtgtggtattgcgcgttctggacgattttagacgcctatctgtcgatgttagaccagtggtcaacgacctgtacaaagacggcacatcggaagagcaaccagagattctatctgtccctgtcattatgccgggaacagctaacacacttatcagcttcccattgaatgttggggatacggtgttgtgtgtattctctcaaagaactatggacgtgtttaaaggctctgccactggacagccacacactccaaacgatcttcgtaagttcaacatggcggatgccattgccattcccgggctgttcaccttccctaggtcgatgaacgaccctgcaagacatagttggccacatgataccaaagaccttactattgcccacaacctgatgacgggacaagaggcggaagttaggatcaaagccaatggagatattctaatcaacagccgcaagactataagcattaatgctcaaaatgtcaacgtcaagtgtgcttcactcactgtcgatgcagcccatacaacatggaacgggaacattgcacatacaggtaactacgtgcagactggtggaacttctacattcaacggtattccattccacactcacaaacacggtggtgttatgccgggcggcggtgttactgctgtcccacaagcttaaaggagatcatatggacttgtttgtcaaccccgacacacatgacttggtttttataaatggtgaagctccagtcactcaacgaatggttgatattgttgctcagcgactaaagatcaaactgtacacattcctaggtgagtggttcttggatgataggatcggcatcccctacttcgagaggattcttggtaagtctaggagccttcccgctgttgacgcgatattccaatctgagattatgagagaccccggcgtccttgagattacatcttggcagtcggggatcgaccctcacacacgtgaatactccatggagttcacagtcagaaccacagacaatacagaatcccttcccatcactttcagaatgataggagtttaatatggctggaattacagcagaaggtctaacgattaaagacttggaccaaatcctgacagactacagaaacgtagcctctcaggtcttcgccgacctagtttcaactggagacgaagttgacacgtctggtaactctgctctaggccgtctgatcggcgtagttgctccatcggacgaagctatctgggaagttatccagatggtgtataactccttcaacccggcagccgcaactggcgtggctctggataacctagtatccttctcggcaattagccggcatgctgcacgtccgacccgggctcaggttgttctagagggcaacatcaacaccgttattaactcgcctcccgcgaagatgatttccagcagtacaggccgagtgttccacctactacaaggcgtgatcctcactcctaaagcttgctctggtgttggaatcttccctcagacagtaggcaacgacctgacgtacgagcttaagatgtacgttgatgacattaacacaacgtctatcaagtacacaagtcctgccactggcacagtaacatccgagtccatcctagcaggactggccgccgacgtagctacaaatcacggaaataccttgacaagctacgaacagaatggtatacttttcatagtacctattgacccatttaacaccaagactttcgaagaagcctccaacctgagtattcagaaggttagaaagcttggtatcgctgttgacgacgttattggccctgtgcctcagcaagctctagctatcgatacgatctccattcctattgccggatgggacagcgttatcaaccctgttccagctatcactggccgtctgcgtgagaccgacgatgagcttcgcgagagattccgaaactctaaattcgtacaagccaccaacattctggagtccctaatcgacgggctgatgaacgtagaaggagtcgaggatgttaggattatcgaaaacgatacagacaacccagacccagttcatggagtcccgggtcactcgttccttccaatcgttcttggcggtattcctacagaggttgcacagtctatttggctgaacaagccattcgggattggctctgttggagatacagaggttcaggtggtagacagtcggggatatacccatagagtcaactaccagcgccctgtcgaggttccaatcgagatcaagatcagtgtaacaaacacaggatcgatgccagagaacattgaagatatcctacggccaaggattgtagcgtacgggaccgagaattacaagatcggagacgatgtaatttattctcgattctatgctccaatcatggaaatcccgggcttccaagttaacagcctgacgattgccaagaaaggacaaactcaaggcatggcgaacattgaaatcgggttcaaagaagtggctacattcgccgcagcagatatcaccgtaactacggtgtaatgatagaaggagaattccatggctgtcaaccaatttgacagagaagattatctggaggtggcccgggaacgggtcactgaacagtttaaagagaagccgatctttgatcgcttcctgcaagtgctattgtctggcaagtttgatatccagaatgcactggaagacctccagactctccggtctctggacacagccaccgggaagcaactggacattatcggagacattgtagggcgaccacgcggtctagtgtaccaagatattttcaactattttggattcgctggaacggagcgtgcaggttctttcggaagcctgtcggaccctacggtcggtgctccatggtactcggtcggtgctccaactggtaacgccagagagccgagcgacgaagagtatcggatgatcctgaaagcaaagatcatcaagaacagaacaaactcaaccccagagcaagttatcgaagcttataaatttgtattcggggttcctgaagtattcctagaggagtacgctcccgctgctgtccgtatcggcatcggtaagattctaacgaacgtagagcgtagtcttctattcgacctaggtggtgcaggtgcattgcttcctaagactatcggggttaactacacatacactgagttccaagctggccgggtatttgctacagaaggcttccccggaggacaaggcgttggagacctaaacgatcccactgttggtggaattctgaccaacctagtgacataaggagttataaatggctgattacagtcaactacctattgaaaatatttggtccacaggcggggatatggtagccccgacccctgcgcagcagcaaggcggatggggtattcagtcggttcctcgccaatggtggaactggaagtggaaccttcacgatactaacctagcgtatttgctacagaagggcatcccagagtggactagtacacaagagtacattgctaacaaatcgttctgcactagaggtggatttgtttacaaggctgttcgtacgcatacaggaagcgaccctgcacaagttagtgccaactgggttcgagcttttgcagattacaccacatctagctctgcacttggaagcctgacaccaagagagggtggaatcccattcttcattagcgctacaggagctagcgtgtttgactctacggcctatggtcgcggaatgttgaatgtagctaatgcctccgcagctagaagctacatttcggctcaagaaagctctgttgtactgtccaacctgtccactgtgactagggctgccaacacggttccgtacttcaacacggatacctccatggctaccttcaacatcacagcgttcggaagaggacttgtcaacgcggctaatgatgaaaacgcaagaaatttcctaggactagctaactctgctatcattacggcagacccagctaacagggcacatactctggtctatagagatgctgctggcaacttcaacgctggcgtaatcactgctaccctgtctggaaacgcaactacagctaacaagcttagaaccccagttacaatcaacggtgtggcgtttgacggaagccaaaacattgttcttccgggcctagatacaagttatgcgggaacggttgcacgtcttcacatcaacggagcgaacctttcgagtgcagataagactactcagctagcactgaggaacaaatctgacaacgactggattagccttgctgtagtggatgacaacattctccagtttgtattcagaagcgctacaaacccagttgtacagattggcaacgaagttatccttcacacaggaaaccagttctctctgggcccgactcttacagacgctaggtctcgtctgggtctcgacagactaactcaaggtagctctgatactcaagtcttccccagcaccttgaacaatggcccctacttgaccgtacaacctacggctatcggaggattcaacggtagcactaacggatggctgttccgattcgacgctaatggtaacatgactcatggtacagttcctgccgctagaatcactggtctgtccaactcggctcagattccagccacaactacggcgcaggctaactctcttgttcagagagacgcagacggaggattcagcgctattgcgattaatgcgtatggcactatcgtcgggtacggctctaacatcttcagtagagcatcgggcactggcaacgcccacatcgggttccagagagcgaacggaacagaactcggtcttatctggggagcccaatctaacaactcgatgaacttccgagttgctggcggagccaccgcagtgtcgattaccggtctggacatgactgttactggaagagtcaatgctaccacactaaacgcctctggaaacgtgaatgcgacaggcaacgttaacgccgggagcgctacgctcaatacagcagggaatatcacaggagccgcttacggagcctatggttctctgaccaactgggttgattcggtatatgccaagaagggagaaattcctaacgatatcgcaagagccggagccgcttgggacgctgtaggtcagtatattctggcgggagatcaatctggagggtctggtggaccggggacaactagagctggaagccagttgaagccttattcgactattagctacacagcaggggcactaccagcagcaggcacttacagatgtatgggagcgtttgcaggtggtggtaaccagattaccctgtggcagagaatttcttaatagagggcttcggccctccttttagaggagattatagtggaattcagaaatgttgtaaaatacaaaatggggttcgaatgcgaggtaaatcatcctcagtggggatggattccgttctacgcttgtgattacgacgatagagccaaactggtatatgacgccatcgcccgtgctgtcgataacggagaaatccccgaaccaaaggacgttacagatagagacctcgttgtagatgcacgtctgtggagagataatgagctaacccgggctgatcgtcaagtagaaattgctatcgacgatgaagacgaagtaaaagagaaggcttggcgtaagtaccgctctgcactacgtaagtggcctgagcataaaaacttcccagccgagaagagtaaacccaaagctccgaaggagtgaggtaagataatatgccaaacattatgaagcctacgggaatcaacgctatctggtctgaaaatggccagaaggttgacccgggtgctgtgaaagtagggctaggctgggttacggaacttcctccgtaccagactgcaaacttcattgaatataaacaagacctgtttaacgctcacgtcaaccaacatggtatccctgaatgggatagcgtgacagagtatcagggtaacctgagctacactcaaggcgctaacgggatcatctataagtgccttagaacccattccgacaagattccaactgaccctctgaacattacagccggatattggcgagtggcgtttgaggatgcgggagaggcagctaaggttcaagccaaccttgatcggcatgtaacaaactacaacaccctctctgggattggcaacgtagttattgcaagacaaaacctaagtgtgtatagtaaagctgaaggcgacgcccggtacgctatgaagcacgggaacggctctaatgttttcagcgtcgccactgccacacagccaactcacgcgatcccgctgagccagctatcgactctcgttcctcctgcgaccgagactgtagccggggttatggcagttgctacgactatcgagacagaagctggagccaatgataccaaggctgtgagtccgctcaaggccgcacaggtgtatctgaagaagaaagacaacctttccggtctgtctaacgtcactgccgcaagagctaatctaggactgtcggatacagcgactatgccttcttctacattcctgaaggcaggtagcaatctggcagatgtgcctaacaaggcgctggcaagatcgaatcttggaattacaagtagtgctacccagccggaaacctatttcttgaggagcgctcagaacctagcagatgtacctaacaaggcacaagctagagtcaacctaggcctcactgggatggctacaacagaccctgcggcggttatgatgaaggcagacaaccttgctggattggctaacactgctaccgctcggtccaacctagggctaggcacagcttctactagaaatacaggagacttcctgtcgtctggggataacctgtccgacctcacgaatgtccaagcagctagaaacaacctagggttgaagggagcggctacgctcgatgtatggggtcttcctgcgaatacaactgccatggacttccagtctaatcagtcggatatttccagaggatgggctcgactaccaaacggccttctgctacaatggggaactggtcccggtctatctgatgacacaaggacgaatatccaactccctgttccagcacgaatcttgaacgttcaagtgaccgtaatggggacgtttaacaactccatcggcccgggcgctttcatgacggatatgtggagcaacaccgggtttagagttagctgcaactggggcaactggtcttacccgttcaactggtttgctatcacttccaccctgtaattcaggagtatcaaaaatggctctaactgagcaagacttccaatcggctgccgatgatctcggagtcgatgttgccagtgtaaaggccgtcactaaagtagagagtcgtgggagcggctttctactttctggcgtccctaagattctattcgaaaggcactggatgttcaagcttctcaaaaggaagctaggtcgtgaccctgaaataaacgacgtttgcaaccctaaagctggaggatacctcggcggacaagcggagcacgaacgtctagataaagcagtcaaaatggatagagactgcgcacttcaaagtgcctcttggggcctattccagattatgggattccattgggaggcactaggttatgcgagtgttcaggcatttgtcaatgcccagtacgctagcgagggatcgcaactaaacacttttgtgcgcttcatcaagaccaacccggcaattcacaaagctttaaagtctaaggactgggcagaattcgcaagaaggtataacgggccggattacaagaaaaacaactacgatgttaagctagcagaagcctatcaatccttcaagtaaatctaggaaggttcctaatgaagaagctattcaaaagctggaagttctgggctgctgtaggctctgcaacttttatggctctggaagccatggttcatctttgggagcctatccttcctcccggcgtgttcgccgcagtagccacactggtagctgttggtgtgagaatttcggcagtgtttgtaactgctggtaaagtggaggaagcgatttcggaaaccatggaacatgacaccatagaagatggctcaatagaaaatgatactaactaaactcaaaaactacgccctcgtagtagctgccgcaatggcagcagggtttggatatctgtcgttctctttgtacggcgacttagctgttgcgaagaatgatatccaatctcttcaagctgcgtctcgacagatggaagagcagttccagaaagagcgagcagggtgtgagatcaccactgggagactagaggcgcatatagtccaaatgaagagccgacaggagcttctacaaggccacctgtgcgagcttgagtctctacctaacccaaccccaagggagacccaagaaaatgccacagagacgatctctgagccttctactggggatagtctggaccctgctcttacaagcttgctcgacagggccttctgttccgcagtaccaaacgatccttattgtgcccccggcaagcctgaccgaggaggttaaggtataccgagtggagcaagatacagtcaaggggctcgctagagcttacattctaaatactaacagtgctgccatgtgcaatagtcaactacagacaataaagctatgggcagaagagcagagggctctatatggaaagtaaagacggcaaagaaggcctaatcaaggtagctacacagggagttatctctctgctaattgctatcctaatggcttggtctggattcctaagttccagtctttctaagcaggaagaacgtatctttgcgatgcaaagagatatggtatccgaggcaaaacttaacgcactagagtcgagattcaatagccgacttgaaagtgaaattagtaacgtaagaagagaacaacaagaaaccaaccggtatttgattttgattatgaatgccgtcaagggtcgggatacagaaactcaataactataacccgttaacccacactgggagacaatataatgacaaggaaacaagactggccgctagtttcagcagtcggggctttgtttatctccctccttgtctgtatggctattctggctttcacagcgatgactcccgaggctcggtttgactctgtacgccagacctacgagattcgaattagcgaatctgagcggcggtatgaactcaaactgaacagactacaggatcagataaactcggcctcgtacacacaggatcggcaatcccgtttgcaatatgaagaactcgactcgcttaaaaggaagattagcgaacttgagcggagaataaaagaaaaacaagaataattaagccccgggagcgaaagcttaccggggctctttgtcatgggttttcagcgaacaacttgataaacttcatcgaacaggtcatcaagcttctggataaccttcttagccagcttcttgcgaactttgttagcctctgggctggaatggagtagcttaatatcggacgcgttgccccagtccatcgccccgttgtcgaacagcactttaacattcagatgcatcgagccctcgtcaatatcgacaactacgccggtcatccgagcgttggtcttttcgaaggtcggcctcggaatgtctatgtccagactgccaaccataacaacctgccctttcttaacgtcaaataattccatttaaaacctccttaatctaacttcattagtgtgttgaactgatgcctcagagacttaaaagcctgtggcccatcgtcttccgctccttcatgaatatgatgagcgattaagtgtatcaatcctcggtctcctagtaacaaagaactaggaatttcttttatccaagccacaaagcaacagaagtgtagaacctccggcatggaagccttgaagctggaatcatccagcttcgataggcgttcatacgtagctttaagatcgggatagcttaactgatatgtagcatcttcgtcaatatgctggtcccctctaactacatactgcaagctcatattacaccttctttccgccttctgcaagacgtgcctctcgcttatggtcggaacgggtcatattgtactcgatcttctcgatgatcgcacctgcaacatctagacctcgaacattcgcgtagtccatgatacgaatgatagcgtcagccagttccacctcttccatcttccgctctggcaagtgatcgtccatcaaatccttacggactccttcagccgcttcggcgatttcagtggtaacgagcatcagcatgtgcagagcatcacgtttaatcggctcgcctgtgaccagatcggtgttccacttgcggttaacaacctcaaggccagtcatcattttgttaaaaccgctaacaaactcgaagacggactctcgttcgaatagttcaccgaacgttggctcttgatcttcgacaattgcagtgtggaaaggccactccatccaagcgtcatagcactttttgataagctcttgttcgtcaatgtatgagaagaaatcttcatatccatcaatcgcattaacaacttcagttcccctttcccaattgcgcttatcaataagtctctggtcgattcgcagggaagtgctgccaacttcttcccatgatctccagcctactatgccatcgccgaagtacaacagaatgggcagattgaatccgcgttcttcctgatccttagtctccatagctataacaaacgccggtactttttctccacttacgccattggccaagacgaaagaacccaagtgggtggtctctcggctagctgggcgatgagcttcctcgatatgatctttaactctactcattaacttcaccctcctcgcagaacatttcaaaataacaatcgacacaagttagcatgccgtcgtcgcttacaacctcctcgggagggaagttgttcccgcaacattcgcacacaactcgatcaacctccctgcatccccagtaagccatatttactcctccttcagaagatactcattgctaataactttgaagctgaagtctcggctcatgcttttgaaaaccaagccttcccggtacttaccgttcaacgcagactcgccactagccattttaattacgagttgcatgtcttttggaacgcctacgtcccacatgtacaccggcacatgtttgaccgtctcaccacccaactggttcagcgtattcagaatggcaagacgctccgctggaagacagtaacgactgtccgaaatgttgtagatatcgtacacatagtattccggtttgtcaactccctcgaagttgccttgaatatttggtgcaaccagttcgccttgaagggcaatattcagaccgaaataccggagacgttcaccaagattaagctcttctgccatcgcagtgaagtgattggagtctttcttaatcacacgcttccagccccgacccttgaagaagttcttgatagcagtgaagaacccgatcttctcgtcttctagacggaaaccgacatttcgagacgccacgcctacttctccgtccttgtgccagatagtgagagacgaaccgtccaatttgaatgtcacttcaaacttctcgcccttctgatgagcctgatcgtaagccatctgaatattttgtacgcgagcctgatccgtcttcgggatgaagttggggaaccctagcttggaagtgccagtccggctgcccttgttgcctccattgatagctgcctgctcggaaggctttacatacttcaggatgcccattcgatcggtaacatcttcgtctactttcggctctgggctgcccgctgcatgaacaggtacgatcaggccttgactaagctctttacgaagcttcatggtcttgattcgagaatactcttttccaccttgttcgaccatattacggcctcgcaggaattcaaagatagggttatctacaggcaccatggaatccacttcaatgtagattgccagatcaccagcctgatattcccctcgtttgattacgcactgccaaccaccaacaagcgccagatcgaggctgtcagcgttaggatgggtcttcacatcgtcgatacgcaccactcgggctagtacgcggtcttgggaattactcatatattatcctccttgtttgaaaattggtatattacttgttaaaccagccgagatcaatagcccgctctagggccagtagcagattctcagcatctagaaggtcacggatcgcgatccaactaccactgtctcccggtagaccgtctgtgatatacacaggtatgtcactgtattcgctctttttaagcccgcaggcacaggctacattgtccccgaagacaatctcgctgacttcccttgcctcgtctcgaatatcgatcttcacacctaccctcctgttgtgttgaaagttgttgtattctgcccggatatcttcgcagtgtcaatagccttgacaagaaaataatccgtgatagagtgaggtctctgctggagagaaatgtccacgtcactcaccggccagcagtatagcgtatgaagaggaaagctgcaagcgcaacctgagtcgaatctgagaacagggcagcgacgacccgaaaggggaaagctcagagcctataaggaacccatgttccccgctcaccgactcatctgcatatatgtatatctgcatgagagcgagaggtagaccaaaggcatgtcttaggcggagattccgtatggcaagccttgggacaggtctgcctccactaccgatctatctgcataaagggggtacaatgtattcagcaactgttgtgaacagacactacgagaaatttgatgtgtatataggaagggggagcaagtggggtaaccccttctcccacaaggaaggcaccagagccctctacaaagtagatacagtggaacaagcaattgagtgcttccgaagtcatctttggcgtaacataatggaaggattaatcacagttgatgaccttctggagcttgacgggaagagattggggtgttattgtaagccccgtccttgccacggcgatgttctggtgagggcaatcgaatgggccaaacaacacagaggagtgtataaatgaaacatgttatttaccgagaagacctaatcgacctgttacgcgaccgtatgaagctccaagcgctggaggctggtggcgttgacaactgggactggtatgaggcctcgcttatcgactgcggattcttcgatgatgacgggcgtgagcttgaggtcgaagcacttgcagattgcttcccaaccgtaggtgcgtaaccgtggaggagtcgaaagctaccttcaaagacccttaccctaggttcttcgacgcttctcgtaggtatggcgaaaccaacgactgcatggtggtgagctttgcagtcgtatggaacaccacctatgaaaaggcacaccagcacctgaaagtgaagtgcaagcgcggttaccggcaaggggctactcagaagcgcttcagctacgcagacacttggtgccctaagacccggatgctctaccgggaggatgctaaggataagactcttaggcagtttgctgaggaaaaccctgaaggtcggttctggatcgcggtaaagggtcacgctattgcaatcatcgacggagtgttgtacgatcacactaatgacaaaagacgcaccatctggcactgctggcaagtgtggcccggggaggcacctgagaaaatcgagaggaagcctgatccaatctcacctcctgtgagaaaggccccagattggtatgtctgaagattacaactgaggaggaattatggaaattatttcgagagggacgctccctcaagaggttttgtttacggctaagtgccaccactgcttgagcattctccgggctaagaggtcggaacttaagtatgtttcgttctcattcggacgccccggggagactgggtattatttcgcagagtgccctgtgtgtaacgaagaggtgtctgcttgggttgtggttcctaccagccctgtagcacctcctcccactgtagagtatatcacaaaggagcgtaaataatatggaccagttagcaggattcatgggcgaacctttcgtaattgcgttcgactacgacgagacgatcagtctctaccctcttgccttccgaatcgtcatggataccttcaggggctttggaggcgctttcaatgtgatcgtagtcactgcacgccaccctgacaacagcggagagttagagtggctacgggactacgggttcccgatctatttcacggcacagaaggcaaagcgaccattcatggaaaatcttggaataaaagtctctgtatgggttgacgacaacccgttcagcgtggataatgaccttcctccgtggacagcggagcaatacgacgcctaccttgaggcaaagaagcaacgagctatcaacagagggagtaaagcatgagcgagattattaaggttgaagtgggagatcgggtggtccttaaggcctattgcgatacatacactggatgtgcaaagcgatgggcgcaggcgcatggtcgtttgcatgaactgctagctacggggtttgtagaagacagttgggtccacaccgacgaactggccggaggcttgaaaggcaccgttgtgatgactgaactgggactgaaggaagagtgctgtgcagtacgtctagacgcctacactgaccacagggctgttgtagttgttgacgcttctgatctttacatcgcatgtaaggcagcaaaagctcccgtaagcaccctagacgaggccttcggttgcgaccacgactaccttatggaatctccggctaacgctcagcgactgaatgagtccgtcgagcagctacgaactggccaagtcgtagaagtggacgtgcctatgagtgtaaagcaagacgaaactccacctgtcgtagtgcatgtagtagagaagatttacgataggaaaggtaacgtacacctcattctacagtatgaggtagcaggggcgctaatcaggacggtggttgaacagggagaactcatttacttcttggatgaaatgcaaggtatgtacttgaccaagattcaattggaggtgaacaatggagttgtatgaccagtggcgtaagtatatgagcgtcgtaatcttagaagaagaagataatgagcgtcagtgcatgcggcttattgaggcagttggcgaactcgatccctatatccaagatttcctagattctttctctattaaaactgaaggaggtgtgtaagcatgagtcagagtaagcgcgatgagattgtagttgaagcacgtgggctagagagctacttcatttcccactggaacggctgggatgtgatggacactgcttgtctcggattttatatcaaacctgagtatgttcttgacccggatattcgagagcttgagcctagcttcttggagcttgatttcgagcgttgccgtttccgattctggggaaatgaagacgaaggcgtggacggcaaactcatggagggcaagttgcagattatgaccaactccttcgagtacgtcttcttcaaggaggtttgagtggctagacagacttacgagtctgcatcagatagggcggtcgaggaggccgtccgttctgagcttgaagggcggtggaagtgttctcttcataagctacctagagcccactatatggattgggcagcctgccggaatggaaaggttgttagctttgtggagcttaaggctcggaataatgaaatgcagaaatatcccgacttctttgtgtcccagatgaagtggctccatgggatcgaaatgcaaagggtgtttgacattcccgcattccttgtggtaaagtggacggactatacaggatatgtcaaaatgacagccaacggcgtcaactacatgagcatgggtggcaggattgaccgtggagactggcaagaccaagaagttatggtccatatcccgctgaaagacttcacacgtttataggaggacacatgaagagactctgctaccgttgcatgcatcttggagagcctgtcatgctccgtcataagacgggtatctggtacaagggttgtagtaaatgtggatcaggagtattctatggctaagaagaaccctgtattcaagtttctgaatacagtaaacaagccctcagtggagagggataaaaccaaatacaggcggaagcctaagcataaacagaaggagcgattaaatgaagaagggtgataaagtgaggatcaatgatgatgctgataccatcttccggggccgtgttgccactatcatcgcagtagacgaagagggttgcgttatcgacgttgggagttacgaggatgagagcggagagctgatcgagtaccttcacctattctttgagcgttctgagttgtccaagcaggcgtaggagtgtataatgaacggacccgagtgtagatggtgcggagagaaaactgaagctgagttcgtagacgttgggcttggatggacgcagcaagtcactggaggcatgtgtcaccagtgtggagggtacgagaacggttactaccagaacgacggaaggctcacagaggtcgagtttgccacctactggagtggtccgttcgaagattatgcggatttctcgccattcaatcatatgagagaaggcgactcgccatgaaggctacactgagaaaccacaatctgctatacatctacttccacacgttctcggaaatgaatgagtggttgacagagaacgctgtagatcagtggacagtcactactctgggctccggctatcaggtggctgttcctatggaccgtgcaatgcgggaccaatacgtctcggaggggggttgacacgaacacaaggtgatgctaaactccgtggttgtctgaagtaaggaggttttatgtccaaaatgaccgtggcccaaattgcggctatgcacggtatcgatctgtattctgaccacaagaccgcttgtccccaatgccggaagaaaggcgctgacaacagcggagacaacctaaaggtctatggtactgatcgtaataccggggaacacaaaggtgcctattgttgggcgtgtgggtacaccttgctctctgaagagcaggaaagagacgcccggggagaagacgaagaggagtggaatttcgtgggaactgaatttaacgcagagatcaacgctcaaattaaagagcaatgctcgtatgatccgcgtggttatcgtggcctgtccaaggaaacttgccagtatttcggagtgctacatggtttcgacccggagactggcgagattgcaactcagctatatcctactactactaattatgaactcactggctacaaacagcggatcatgccgaagaacttctcagagcctatcggcgagaccgggaaggattgcgagctttttggtcagttcaggttcaagaatagcaacagcaagaaggtgcttattgtaggcggtgaggttgaccagctatcagcattccagatgctcaaggagtatgatgaccggcgagcaggcggtaagagtgattatgaaccgactccagtggtcagccctactatcggtgagagtggggcgtggaaacagctacaggctcagtacgagtggctagaccgattcgaacaaatcatcctctgtttcgacagtgatgatgcaggacgagaggcagcagacaaggcagccgataagcttccgaagggcaaggtgttcatgatggaaatgaaccgtaaagaccctaacgagtatttgaaagctggccgtcagtcggagtttgtcagtgcattctatcgagcccgtacatggacccctagcggtattgtagggtctgatgcactcgacgctcgaatgtatgaagctgtgcaggttgagaagattcctctgccaccgttcgctaagaagctccagaaggctatggcaggaggcatcccgttgggccggattgtgaatatcggcgctgcatcgggcatgggtaaatctactgtagtggatgagttcactctgttttggatttataactcgcctcatatgccgggtactgtgactctggaatcggactgcggggagtacgcaatcaagctgctgagccgtaaggtaggcgagaaggcagacttgtacgagaccgttgaagagaaagtggcgttccttgatcggcaccgtgacgctcggtacgacttgtggcacaaggaagacggaagcccacgcttctatctgatcgatgaccgagacggaagcctagcagccctcaaggctcaaatcgaacaactgattattcagtttgagtgccgtgttattattctggacccgcttcaggatattctggacggattgagcaacgaagagcagtcggtattcatgcgctggcaaaagggtatgaccaagagccaccgagtgacgttcatcaacatcaaccacgtccgtaagagtggtggtggtcagaaggctaactcggcaggtgctgaactgtacgaagaagatttccaagggtcttcgtccatcttcaaatctggtgcagctaacattctgatgtggcggaacaaggacgcggagaacgagttcgaaaagaacctgattaacgtgaagctctctaagtgccgatggactggccgcactggaatgatgggcaattggtactacgacgttgagactcatacaatctgggacttggacgactatctggaccgataccctgacaagcgccgtgaacacgaggcttggatggctcagaaggaagaggaaggccgggacacggaatactaaggttgacagaggggtgatgcttatgtatcatccctttcgtcgtttacaggaggaaaggaaatgcaacaacgatttgaaacaatcgagcaatacctcgaatggatgggaaataacaatttcaccaacatgacttgggatatcgaggccacaggcctgttggatgaaacgtctatcgattacactgccagcccctacaagattaagcctagctacaaacaccactgcattgtagtggaggagcacggtggcaatattctggcattctacgatgggccgacctacgtctttgacgggcgagagtacactgagagactgccgaaagcgtcttccatgctccacactgaagaagttgtgactctcaaggactacactccggtagagtatattcacctgccgctgaaagagttcaagaactatgtgctcaagcgcaagatcaagcgcgtagtggctcacaacatgattaacttcgaccttatgtcgatgaagcttgtggaagatatggacttcactatcggcgtagagcacagggatggcggtctgactacgtggtctgctgacacttggatgggcaagcaagtggtattcgacgataccctcgttatctccaagacttgtaaccctgacctgttcggcggtcacagtctggataagctgtctcgtcgtgcaggtggtgacaccaagattgacttccgtaagcatttggcaccggatgttcgattcctcgacttcgcagccgatatgctctactactgtatctatgacgtaaaggcgaacaccgctgtatggcattggttgcaggaccacgaagattaccaactgtccgaccgtgacaactacatcaagaattggctgtccccgattcagttggagaagaaggttgcagagatcatcacctatcaggagcaccgagggtttgttctgaatgttgatctctgtgaaaaagctgtgaaagacttggacgccaagatggaagagcgtcgggcccgggtagagcctgtgcttcctcctcgaccagctaccaagaaattcatggcagactacacaccgcctaagcggcagttcaagcagaacggggagatcaccagctacttgcagaagtttattgagcggattggggctcagttgaaagagggtgacgaccggacgatgatcttcgaaggcaaggagtacaagcttccgcttcccgctgacgtaccgctgaagacggaaatgcctgctaagatcggggacacaactcacatcaagcaatggcttatgggtgagtttggttggattccatcagagtggaaagagactgatctgactgtggatcagaagaagatcaagcttccgatggaaaacatcgttgctaagatcgatcgctggctggatgtaacgtatagcacagcgtacaaggaagagcggctggacgggttcggggattacatgaagatcacccctcgtagcacccgcgcgtatgtacgtcagaggttgattgatcgtgcaagcaaggggagctgtaaggttctcactaaccctagcttcacaaagggccaagagaaagaaatgtgtccagacctcgaacgcattgcagaacagtttccgttcgcgaaggatgtgattgagtacctgacctttaagcaccggcgaagcgcaatcctcggtggcggcatggactgggacgaaatggaggatggagaggagccggaaaaaggttaccttgcaagcattcgtcaggacggcaggattcccacgcctgctgacacttgcggggctgctactagccggatgaagcaccggaaggttgctaacgttcctcggatcacctcgttgtacggggctgagcttcgagagttgtttggggttggagatgggttcttccaaattggatacgacttcgattccttggaagcacgtaaagagtcggcctactgcgatcagtacgatccgacaaaggaatattgcaaatctcttatgatggagaagccatttgacgttcacacaatgatggctaagcgtatttctgagatcattggtcgtcaatttaaccgatctcctgcgaaaaacgtaaaatacgggtgtacgtacggtgcccaagctggtaaagtggcaaaaaccattggtgccgatttgcaaacgggtcaactggtattcgatgcgttctgggatgcagcattcccattgaaagctctgaaggacgacctcaccaagcaatgggaagccaatggcaagaagtatatcattggagtggacggtcgccgagtccctactcgttcggctcacgctatcctgaacagcttgttccagagtggcggtgttatctgtgctaagcgggctatggtgattcatgatgtactactggagaaagaaggtctgaaggttgactttttcaaagaagactggaagaacaagccggaattctgccaacaaatgatcgcgtaccacgacgaagcgcagttggaagttacagctaagtcggtcagcttcaagatgttcccttggtctcttgtaggcggtaagccagaaggagaaaaggaacaggaggaggcggagaagaagctgaaagctctagctcaggcttacaaggacgaacaattggctagtactggcaaggtgtggagtgatatcgcacactacagcaaaggtgaaggcggggtgtttgtagcttactgccgcgctggagaacttgccacgaaggccgtgagagctgcgggagagttctactctactcctctggtgcctatcgagctgaccgctggctacatcgttggtcgatcttggaaggattgccactaaaactggcattaagcgaggaaaggggcttgacaggcccctccgcctcctatacaatggccacatattcacaacatacaaggagaaacacaatgactctggctttcattatctatctggtaatgaccgtattcccagccttgtcgtcggctggtagctttgccctgatcgtcaccatcatcgcatgggttgcaggagggttcgtttacttggcatccattggtggccgagagaattcggcagttaaagccacactcaaaaatcacctacggcccttgacgttcaagctgtttctgcctatcattgtaatcggccatctggtgccttcgtctgagacggcatggtggatggtcggcgggtacgctgcacagagcctctatcaagcagacgctactcagcaggttctcagcgaatctactgaactgctcgaagctctggttaagcgggctaagaaagaaactctgaaggctgttgaaggcagcagcgagtgatacggtaatcacagaataggaggtatggtatgaacacggctcgactctacgtctacggcaaatcgtccatggtaggaatcactgttgacaacaaggccaatcgggagtactatacctctaaaggcttcgaggtatcggagacaccgttagcccacaaaagcgtggctaacaaatacaaacagaaaggaggtaaataatatgtctggtgttattcccgggactatcgtcaaactcactcaagtgggatgtgacgtcaccgttggctggccaaaggaagcccgatatgtaggcgcatacgcagtcgcagtagatggacgcgatatcggtctcccggaaggggaaatccggttctgctcccttcattggtccattgaccgagacgtcaatgatggacttggagactaccaatcgatgctcgctgacaacgaccgcttcgaaattgtagcagttccgggcaagaagtattacgttaagaacgttgccaagcacagcgcacagatcggccattacttggttccttcggagccagccttgtacgtaggtttcgagccgtgctggctgaagagcatgcacgaaggggagagcccgttctgcatgacttttaaaggacgcgttgacattggcggtgaaacctctgacaagccgcagttccagaccctctaccctgagctggtactggaagagtttaaagaagaggcggagggcaaggttgaagctccggttgacgaagagaagaaagaaaaggttgcaaagcctgctgtaatgggttatgctgttctcgatgcagacgggagtcctcttaaattctgcctcactcgcgaagaagcccgagccaccaagcgctggtggggtggcaaggctgagggagtctcgattgtaaaagtaatcaaaggagaggaggtgcgttaacgcgcttctcctcttgcagaatccgggaatgtccggtatgatcgtcagtcaagtggctgacacactcgcccagtctagggtacttaaataggagaaatgaaatggcttttaaactgaacgtaaccaccaacactcaatccggcaacggcggcgtccgaaaggaagtcgattgggatgctctgaacaaccacgtagttgaagctgctggcactgccgctaaagcgcgttcgatcccgggttatatctccggtatcatcgatctcggcgagcaagagcagaacgatgcagaggttgtgttcactggcactgccgaagatgaaatccaaatcatcaaggaatatccgaacacttacttcaaggatggactggacaagcagactcgcaagcctgtacgtctgaagtgctggccgcagcgcgatatgcaacaaatcgcgatcactgtggacttccctcagatcgaggtagacaagagcctgtacctgaccggtaacagcaacaagtctccgcttcgtgtcctgtacaacggcgactttactctgccgggtcagaagactaagattgttggccgtccgtttaccatcaaggaagtgaagcacccgaatggcaaatgggcgttcgccaagaactccatgttgcacaaacttgctgtggctactggcgtcatcaacgaagacgaactcttcaccaaggaccgcgtaggcgagcttctgggcaaggtggctcagttccaagtgcgagtgtggatgaagccgggcaagaacgatatgaaattcctcactgaggatatcagtctggtcggtatggttcctgaaggtgttccggttcccgagctggacgagaagtacatctacggtgtcaacctgtatggcgagaacgacgaagaagcagtcaagcaactgcgtgctaacgtcatcaacaccatcaagcgagccaagaactacgaaggttcggatatcaaggcgatgatcgaagccgttgaagctgcacgcggtggtaaccgctccagtggcgacagcgaagagcaagctgaagataagccgcagacccaagctgcacctaaagtggagccggttcaaaccaacgtagatgatgacattccgttctaaagggcggtggtaagacaaggggcttcggccccttcctttcaaaatttcaaaggaggcaacacatgcaaatcaattttggtcccatcttccttctcgcagcaatcgtcctgtgcgttctgaaatctgccggagttctcgctatctcttggactgtggcactcatgcccatctggattcctcttgtaattgtattgtcgattctcgtactgtttcttgtaattgtaggtctgatttacgcattcggcgatcgtactaaactgaactttagctttaaaaagcacttccggaataagtgaggactaatgatgagtagtttggttattgttcgagtacctgagtacattctaaaaggccccacagtaaacaaccagttcagcggtgacctgtgggagcgaaatctcttcaaagatttgaagaacgctgcggagtgtatcattaaaggagagccggcttatgttgctcttcctaacaaggtaaaccctgacactctacaaacagagtgggacattcaggttgtacagttctaacccaaggggagcttcggctccctttttcattggagataaaaatgagtgaaaaggaagaggatatcgtcctcatcgacggcgaccttatcgcctttaagtgtgcaagtgtcaacgagacccgctccatcattgtcagaaacaaattgacaggagaagaggaaacttggaagaatcggacgacttggcgggagaataacaaagacgaagagggattcaacgaagacaacttcgaaattgaggaccatcaagaccccaagcacgtgtcctacggtatctctgttgttaagaccatgatcgaccgaatctgccgccaagctgggtgcaagcagttcaagattctcctatcaggccctgataacttccgtgacgccatcccactcccgaaagaatacgagattaccaagggtaaaaagaccttcactcgtggtggcaggtacaagggtaagcgtacagggcagattaagcctcttcagctaggtcagctaaggcagtatatgatcgaagcgtatgacaccatcatccatcccggagaagcggacgacttgatggccgaaatgatgtacaagaacggtgtaagctactccagaggggagactactcagcgcgtgatcggggctaccatcgataaagacgcagacggcactctaggatggctttgtaactacgaacgtgagcctgttcaagtcaagttcatttcaggcctaggatcgctctacagggactctaagggcaaggtgagaggcgagggacgtaagttcttctacttccagcttctattcggagaccctgttgactgctaccgacctgctgacctgtgcatcgggaaggacttcggagaagtggcagcgtttaacatcattaatccctgcacaacggacaaggagtgctggcaagcaatctacgacacctacaaatcgtggtaccctgagcctgtcacttacacagcatgggacgacacagagcacactaaagatgcaatcgatatcatgcaaatgtattgtgactgcgcccacatgcaacgttgggcgggggatcgggtagactgtagggctgttttggctaaactcggggtagacttaggaggtgcagaatgagtgtaaggcctcgcccttgggaagacttcccgggcatctggaagaccgaagccgcgttcttgagttgggtcagaggtggcattcgccgctatctctggtctaagaacccggtcaagcttgagtttgctaaatcccgaaggatcaagatagccaacaccaatgaaaagagcaagctcaggaaccccactgtatggggctatgtgtgcgagcagtgcgggaaggagactcctcaagctaacgttgagattgaccacaagacgggggagttctccctgaagcgagtagaggatatccaagcgttcgtggaaggtgtggtgtttgtccgcataggagatttggctgtcttgtgcaaaccgtgccatgagatcaagacctatgcagagcgttacggactcacccttgaagaggcgggtatcgtaaagcaagctattgcaatccagaagcagaaagggtatgataaggccttcttgcaggaggtgggaatcaaacccgcatccaacgcagagcttagaaaagaacagatcattgaataccttaagtctaagaaggagggtggatgaacgaggatcgggtttacattgtagtaagagacgaggcaccagagtacatggtgccgactctggttgcacatagcatcctaggggcagacatggcaatggttctcctcggacaggaccgggccgttccatcgacggaccttccgtcccgtccgtatatgcatgcagcggcaaaaaccgccattaagtgggtggagtggaaacagtggagcttccgtaagatcgttgtacgagtttctgacaaagagtacgataagatcaagcaaatccctttcgtatatgaggggtatgagagaaccatctgcaatggcgaaggctcctgcctagtagtacctcctctgagcaaagaggagaccccgaatgttcttaaatttgcaaaattatggaggcctctgtgagagagaagtttttgagaattatgcggaagctgcccatccgggtaagggcttcccttgttatggcttggattgctctgttcttctggctcccggttgcaactgcgctaatcgttggaattctagagttcttcgataatgcaaaagaagagttaagaaacggatactctgttttgatcgaagctgccaagggagcttaccagtgcattaaaacgggagaggagttggagtcatgaccaatttagctacgtatgttatacgccacaaaaagaccaaagagctttggaccactcctaaaggaaagcggcaatggaccacgaaaggaggggcagcccgagcttggagaaacgcatatgagagtactacactaggagcgtactatgctaaaagagatatggaacggtggcctgacctgaacattcctttgatagtaggggccgctcccgcacgtctggccggctgggaagcagcatcttttaaaaaccaatcagctttcgagattgttgatattgctgaatccctgaagcacgaaagccagttggtgctcgatctactgaaagatgttattgggttcgaagtgccagaccacatcggagacggatatgtccgactcaccattaaaacgtccacatacgacgatatcatcaaactactgaaggaggcaaaatgagcatgactgacccccgagcgtatttcatcaaacaggagctggaggaagcaacgaagcttctagaaagagccctcaaccttctagataacgtccattgctacgatacagatgtatacgaggacattgcagcattcctctacggtcaagagtgcgaggaggaataaggtgcagcgcgatattagtaaaactatagcagaacttcgggacttgatcgaagctgtctctatgctcgacgaggccttggttatgatgcagaaaaacggactatatgatacggacttgtacaaacgtattgatgcgtttttgtattatcaaccgggcgagggcgagtgggaggaagtagaatgagcagcaagaaacactttgtaatctctgatacacaatgcaagccgggtatcagtctggactacatggaagctatcggtaagtatatcgtagccaaacgtccagatgttgtgattcacatcggggatcactttgacctcgccagcttgtcgtcttatgataagggtaaacgctcctctgagggccggagatacgccgaagacgttcaagtcggacgtgagggtctggacaggctgttcaagcctctgtgggagctacaggagcgtcaacgggctaatcggaaaaaggtgtaccaacctcggttgattttcacactgggtaaccacgaagagcgagcagaccgagcggccaacgacaaccccgaattgtacggcacggtcggaagtgaggaactgggtattcaggattatggttttgaggttgttccgttcctgaagcctatcgaggtggatggcatctattacgtccactacctacaaaaccacttcactgggaagcctctgggtggcacagcgaacaacatgcttaaggctgccggtcattcgtttgtcatgggccaccgtcagcttctggactgggcgatccatcctacaattgacggaaaacaaaggctaggcattgtgactggagcgtgctatcctcacgacgaggcttacaaaggctatcagggtaacaatcacttccggggttgtgttatgattcacgaagtgaaggatggttttggtctgccaatgccggtaagcctagacttcatgatggagaaaggaggtttcaaatgacggtttataagttctggtgtgaatgggatatcggtatcaatgagtgcctgtggcgagactactaccagatggaagaagatgtagctaaagccttgtcagattgcgggattgatgatactattgaggaactggaggacgcaggcctgctcggcttcgactctgttaaagttatcggctaattaggtaataggagggcatatggctgagtttttccttggggcggcccttgcaggcttgttctttatgtttagtatcactgcgagctttaccgccgaagatattgagaaagtgacttcaacatgcgagaataacgaaggcgtcaagtatttcggagttgacttcttcggagacggtgctgtacactgcaacagcggcgctattttcaaaatcgaccgcaaatctaaataatcgaaaaggagatataaaatgactgatttcaacatcacccctgagcaaatggaagaagcaatggcaggtatgaaccctgagcagcgggctctggtagagaaagccttgaccgaccgtaaatctctggaagattccatcgtgaccgaggacggtgaactggactatggcatgcttgcacgacacatccgcaccagcttgggtgatctgcctctggtaatgggtggccctgacttcctgaagctgatgatcttggttgctgcgatgccggagaccaaagacgatctcctgactctgcacatgaacctgtccttcattctggactgcattcgtgaatcgattagcgacgaggagtaacaagtggccgaagagattgtaaaagaagacctatctgtcgacgatctcatggttgactcagcagggctagatgccctgctggccttcctagagagtcagtttaaaggtccgaagggtgtactgaagggatatgtcactatgagagtgatgtgcgctaagatcgagagtcttgacgggtttcaagagttgaaagatatggaggtgaactttgagtaacgatatcatcaacgttcatgctgggcaaccgatttctctggtgcaacggtcaaagaatcctatcaatattcaatattgggacgccgataccatcccttacggaacagtcttggttgttaccgagaaaaggggtgatatacgaaagggagaattggtcgtaaggctggctagtagtgcagatgatgagcactctgttaaggtatgtagattctctgatttcttcctcctaatggagaggggttatgacgcagccagtctcggcgacgttaaacaagcgtatgatgttctgttcgaagatcacccagtgactacctttgttaactgggatcgggctcagcctttgacaaacagtgagcgctactacggagactttctgattggcggcgaccctaaagggatgccactattcaacatggctgttcttaaaaatgttctgtcgccttacactgccgacgatgaggaactttcagctatgtctgggaatcccgagacagtagagcacaaagaagttgacgaactaagtgagagggacgaggctttagccgaggtcgacagactcaatgaagagcttgttgcactgggtaagaaggttgtgttcgccaacctagaagattacctaggcaaagaaaactatgccacattggaagctatggctaaccacaaggaggctgtaggtagcggaggctcctctagttactacactgtcaaggtgaacaaccccactacgaaggctaacatgccgtattttgcagagtgcaacgatatcatcgaagcgctggatatgcgattcggtcaaggcaacatgttcaaagcgttgtggcgggctgcggcagcacagaacctaggcaagctgaaggccggtaacgatgttatccgggactacgagaaagtcatcttcttcgctcagttggagatcgataagattctcagagaaaggggttgacattctccccgaggcttgcgataataggctccaagttgaaacgaaggaggtgtgtagatatgatccagaaactaaaacagaagctcatgatggtgcatcctatcctcgctagcgagatcgtctggtgcctcaccttcgcaatgcttcagtaaaacaagggagcttcggctccctttattgtatcaaagatttaataaggagagtttatgcaaatttctgcaaaagtgattcaacacagttcccggatcggcctaggtacgaagaatcacagattcatcactacattcgaactggagtatcctcggtttattcacagtgaacttatgactcaccgactttttagtcgaaatgctgcaagtagtcgtgccattcccgttgcccatatgatccgacaggtggaagagaatcctgcgatgcctgttcactggggaatgaatcaaccgggtatgcaagctgagttcgaactgagtgagtgtttgcaacgtagctctcagtacctgtggaagaaggctgcaaagagtgcggctcggatcgctagcgcactaaataaaatgggactccacaagcaggtggttaaccgtctccttgagccgttccagatgatgaagaccgttgttacagccacggaactagataacttcttctacctgcgttgccataaagacgcacaaccggagatcaaggttctcgctgagaaaatgtatgaggctcttattaaagcgggcccggcagaggctctatatgacggagagtggcatgttccttatgtgactcggttccgcataggggatggtaagctgcgttacgcagattgtaacgggcaagaactgagcgtagaggatgctattaaggtatctgctagctgctgtgctcaggttagctataggaagaacgacgagactctggagaaagctcttgtaatctacaaccgattggtagatactaagcccgttcacgctagcccgttcgaacaccaagcaacaccgatgctccgcatctcggacaatcaaactggatgggaggacggtgtgacgcacttggaccaatatggtgacctctggtctggtaacttccgaggtttcatccaacatcgtcaactaattaaagggcacgtatgtaatgagtactacggccaagaagaggaaggagtttaaaaatggcagaatataacctgagtctggaagacctcatgctggtcgatggcttcaaagaggcgttccagagtaacaatgagaaggtagtaagggagcatctgtggactaacggcatggatgttaaaaactactcgtatgaaatggttttctgtcagcatcgcaccctgattggccgagtcgtagagggtctacgattctctggctttgagcgtacagacaaggagtggctgagcctcggttgcgcctctctggaagctcatattgcagcgtgtgatgatagtaatctacggttcactcttcgtaagatgcgaccagagggatcgacagaggcaacgttccacaattaatgcagtaggagtagatatggaagttacaaaggctctcgtagatgaggccgatattttcaataagatcacacaaatcaggactccaacggagtcctatgcccggaaatatccggtcattgtcgaactagcaaaccagcaactagaagagaagttgtggttctctagcgaaatgaaggtagagctggataagttgaacctgaagtttaagttggaacctcatcagcttcacgctgtaaagactgtccttcaactgttcctcaaatacgaactgatcgtaggcgaggagttttggatgggtaaagtagtccgaacgttccctcgcccagaggttaaactagcggcttcgatcctgtgcatgatggaattggcagtccacgctgaattctacaaccagatcaacgtagtgctggggatggatacagatgccgactacgtggcgtacaaggatgacccggagcttatgggacgtatggagtggcttgagtctgtgctaggcgacgaagacgatgttctttcggtaattatcttcagcctaacagagaccgcccttctgttcagttccttcgctatcttgaagagtttccagtgcaacgggtacaacgatatccctgtgatcgcacgcggggctaaccagagtgctgtggatgaagacttgcacggtgtagtttcggctgagatcatcaaccaatactacgcagagattggtcgaccattgtctgaagatactcggcgtgtcgagaagattcgacaagctatcgaccatgtatatgctcatgaatgtcgtattgtcgatatggcgatcccgggcggagaacttaacggcgagtcggctgaaaactataaagcgtttgttcgttatcgtttgaacgtatggtgccgtcgtctgggtctggaagatcatttcgagaacgatgacactccgatcaaagattggttcgaaatgaacacgtacgcttacaaaatgattgacttctttactccgggaatgggcatggagtacgaactggggtgggatgaagaggaactagcaaaggcttgggaagaggagctgaaatatgagtaagagagacacattcaactattccgaagctaggaaaaacagtcaagcagcaggagagactcctctgtggtatacgacggctggctaccagttgttcatgaagaaatattcaaatgagggagagtctgttcgctctcgttttgagactgtagccagagctatggctcagcacgcccctacggtgtatcctgagtggtgggaggaggacgaatacactagaggcaaggactgggaacaggtattcttcgacgttatgtgggacggttttgtaagcccatccactccgcttctgtcgaacggtgggctccgcaagaagggcactacggtatcctgtgcaggcgggttgatggacaacaacctctatgaccgttacaatgtaatgacggagattgcagtgctaacgaagcatagtcacggcacaagcttcagcctgaccaactggccatccgaaggcgatgccattcgtggcggagagtcacagggtgttatgcctgtcattcgtgacgttatcaacgtcatggaagaggtcgcacagggttctcgtcgtggtagctgtgcctacagcattaacccccgccacggggacttctggaacgttatcgatcacctgtacaagcgtacagaatcgaacaacgtcggatggttgctggacgacaattggtgcaaggctatggccgagaaagaccctgaaacgctgaaacgatggaagcggatgatgttcgttaagctggcaagaggcaagggctacttcacgttcattgacaagatgaaccggcacctcgcagagccgttcaagcgagcaggtctgaaggtagaggcatctaatctttgccaagaaactgtgcttccagctaatgacttctacacattcagttgcgtgatcctaaactataacctcgaactctaccgttcttggcctgagcatctagtgttcatcgggcaggttatgtcggattgcaacatcagcgagtacctcgcaaccatggacgaagttagcattcaggaccgaagggctctggagaagatttaccggttcaccaaggacttccgagcacttggtagtggggttctaggattccatactctgctccagcgggaacgattcccggtcggcagtatggacgctatgttcctgaacaacgccatcttcaaagggatgaaggagcaagcggaagcttgtaacagttggctagctgaggttctaggggagccagagggctgccgtggactagggaagcgtaatgccactacaatgatgatgccgccaactaaatcgacggcagaactcatggctggggcttctgagggcatcggactggacgttgctatgtgcttcaccaagcagagcgctggaggtgaattcttccgtgtcaacaaggtgttgctggagattatccaagagcgaggccttgattgggaagagtgtgcaaggcagatcaacgaacgcaagggaagtgttcagcacgtagactggctaaccgatcatgaaaaggctgtattccgtactgcctttgaggtgagaatggaagactacctacgactgtgttcccagcggcagaagtacatcgaccaagggcagagcatcaacctttatttcacgtcgaatgactcgccggcttacatttcgtacatccatcgtctcgccatggaagacccgaacatcctatctctgtactacatctacagtatgagaggagcgggagatatctccagaacagaagaatgtgaaatgtgcatgtaaaatcattggcccggggcttgacagcttccgggcctttgtgtattctgagcacatcaaaacaaggagggactaaaatgaacaaattctctgaagtgtactacacttggagcgcagcgtgctctcgtacaaatatcttgatagatatgggatggactgctacaatccgtcgagacttcactggcgggatcaaccctgtatgggttgtggagttcacgcgatgaacagcaaactccgcaaagagttcgataaatggtggggacaggacgagcaagaagaacttcgtaaatcctgtgccaaaggatgggcggaatatatctggatggctagtcgaagaaaagtgagtgttgagcttcccgcgccagaaggcggatttatcgacatccaaaagtacacaatcaatcgctgcaaagaagctatccgcgaaacaggactggaggtgttttaatgaaagaatattttaaaaagcgactaatgcagaccagtgaaccgttcgattcagcgacgcaagctatggacgtagcgattgcgtggggaggggctaagtactgcgaattcacttgcgtaactgcggataatcgcgtcatcagcatctgggagtacaatgacgtagagcctgataaaccggtattcaatggacagcaacgaatcttagttccaacttttgaggaggtagtataatggaacaaactattgataaatctcggtatattgtgcttgataacgaaggtcggcacgttctgaccttgtgcgagaaggccgcctataacctgcttaaaggcgttcagtggacaaaggacaagcatggtcaaatccatgtaaatggtgtcacaggcgttgaactcggagttcgtcaagggattatcgctgaagtattcctgtatccgggctacatcatcctagaagaggtagactaatggatatgttcgataaatacatgcaagttatgtatgaccgggacgctttctcaaggcgagtcggtgagttagaaaaagaggtagccgaactcaaggctaaggtggctatcgctaagtgtgatatgcgtgtcgtgaaaaccctactggaagatatccaatgggtgtatcaagacgaagctatctatactctaccgggctacgtttgcccttgttgcggggaatctgcaaactatgggcatttccaaggcagcttcgataagagcccctgcctactagcttgtgtactgagccggagtgaagcatatgaagcctaatgttgtagactcgctaggcattaacatgtgctacgcctgcggaggtaaactgtacgtccgaggagtatgcactatctactgccctgactgcgagaaggcagagaaagataaaccgttcgtcaggatgcagcttctacaggatatcgcagacagtaagaggcttgacacagaataatattctttgtaagataagcccatcacagacaaggaggagccgagaatggccactacagagaaaattattgagtacgtcgaggtgtgcatatatcgcttgcaggaggacgtgatggcctattctaagggcttcagggacagagccttgtctaatcggacaggctacattcacggcctgattaccatggctgaaatgaatgagcaagtgagtatcgaagactgcgacaagctccgagctaatctgcgggacgcttctgaagcagtgatgaacacattggacttttaaagtcaactaggaggaagttatgataaaagattttgtaaaactcgttggcttgtctgccgtagcctgccttctgcttgtatgtattataggcatgtttgttacagttctgcacagtggggcagagattgttcaatctcagatggaacagaaagacattatcgtgtctaccgatgacggcaccatcaatctcggtcgctccgtgaagagcgagaagctgctgtacagcatgtgcatcaaggtggaagaccgtaagccagcttgcgaattcaccaccaaggataaggtagtacatgaagtgcggcaggtgatgcgcccgggcgaggctactgcacgtgacattaagattgcagttaacgcagcagtgacgtatactggagagaatggtcagaaggctacctccctgatccctccgaaaggtgaattcctgccggcaggtactccgtcagaggtgcatatcgaaacgattgaccgcttgttcgacagcgtgtataatgactacaagcaaaacttcagcaagatgtgaggaggactcatgaaagcacagcctaaagaagtagagaccctatctttcgacaagcgacccaaggccggggatatcgttcgactgcggtccgatggcaaggcttacgaagtgtgtgctgtgtatccgacagcggtaggctgggaggcggcgcttcgaagcgtgtacgacaaaaccaagactgtcactgtcggcatggagtggtgaaatgtccgcgactaacaagtgcgtcaacttcctccctgtcactccggacgggcgagtgatcgtccggttcggtaaaaagaggttaggatggctcggtaaagagggtaaaaagtggtattattacccttatggatgcgaaggcaggatcaaatccgaaggcttcaaaactctgatcgatattaaggcgtggattaaaaaccccgactcggtttggcccgggcccctagcttgagattgactaataagccgacgaatggtacaatgggatgtaggaaattccctactcagtataaggaaactagcaatgactagccgctggaaagaggccgtgtatcgcaagtactcggtacgtcgtctgcggcaggaactcgaagagttcaaagaagctagacgctttgcaccaaatcaacgcatccgtgcatggtttgatgctcatatcgaatttctagaacgccacttggctattcgagagtccggccaagcctacccagacgaccttctgtaattaagtgttgtaggtagagattcaaatcatggttagtggcaaggacgccacactttcagcccgcccacaaggcgggcttctttttgcctgcaattcagggttgacttggagtaccagagcatgtagacttaccccgtccaacacaaggaggaataaatatgaaattcaatatctcaagacagttatgggtggctaaaagccaacggaagggcgattacaagggaacgcccttggcgtacatggctcaagtagacttcaacaaggacggaagcttggcttctagcttcaagaagaagcagcagacaggtgagggctgggcaggaaagagcgctgagacgtgcttcgtagataatgtcccggtaacggggcacttcatcggcgacagcgtggagcgctgggtgaccgagaacaagtacttccgtgtaacggacccgcgaggtttcgttctggaagtcccgaccgggaacatctctaccctgctattcaactgcactgtagtcaagggagtcattcaagagccttgtgtgtgggttcggatgggttctcagcacgttctactgccggaaggttcctctctctacaaagaggctgtaagcttcgtggagcggaaagagtcagccaagaccgttaaagatatggttgcaggggatcgatgcaccctccttagtaacggtacagaggcgaaggcggaggccatctacctcggacgggtgaaactcacttggcaccttctggctcaaaagggccggtactctaaccgtggacgtggcgggtgggcttatcgctggggttaccaccatctggagcgggagttagatagaaaagaattcaccgagaaagattccaagtgggttagtgtgtttgctaagaaactgagtctcggtggacgatggaccctcgacttcgttctatcgccgaaggccactgatattcagtctgggacagttccagaggaacttgagaatctggacttggtagatggtgtaatgtgggagtatgacggagaggatacccgcccaatggcctactactattctgtacctgatagggtagtcaagtgtatcaacgtagacgaccccgcatgggacgctcgatcctacgatgaggtaaggtggactaaagagtggactgtagtgggtgccgagtggcgaaaataagccaccattattttagaattgcccggcgagagccgggctttttcatggcaggggttattttcaaattatttttagatttctgggagtttcggccaatatgggcaatatgaaatttctcaggaaaaggctcagaatgctcgtataagagccgttcgagtgtaggtatggtgagctactacttagccgtagaaggacagtgtaacgcttaataggagggttagaatgaagattgacaacggtggcgaatatgcgtattggctggcggatatcaaagagtttgtttctcagatggatgccacagagatcgagaagagggcttgtatagcatacttaattagctggtatcagcgaagagtactgcacagaattaaacgggaggaatacgaggagatctaagctagggaccggatggatttttagggactggatagattttcacagactgcaaaattgagaactgggcagatttttaggaactggacagtttttcacagaaggggatttttctacagaggaatttcccctgaaatttagccggatttctcagaagggcggatcgttagcaggctatctaattggttagcaagctacctttaatcgttagcacactaactaaaaattcctaggacggacctcagttggcacgaacgttgcaagcccgcaccagtttcccgggcaggcgtaggcctcgactatccgtcgtgaaggcgatatgtagttggggactcgcaccccgcgtttaagatgtgcccattctactatgacagacagctttgtcaacattctttttatggcataggctttgcaattgcaattaacatgccaacacaaatatcaggctcctccggtgtttatctccggtgctcggcttccagcctgcgttgcccgcatgcctactattatacacaagctatcaagagaagcaagaaaaattatagagaaaaatctacacaaaggaggttgacaggcctcctttatatatgcacaatgatctcacattcaacggaacgtcaggtaagcatcatgctacatagtgaagcccgggagatggccctacaagagatgggcaagtggagtctcctcgaacaaggttggaaattcagtttcaatctcaggatgaaacggacgctgggacgctgtaatcatactaagaagctcatagaacttagctacgggtatgtagctgctaatgggctcccggcaatattggatactatccggcatgaaatagcccacgctaaggcgggaccggatcagggccacggatttgtatggaaagagtggtgcggcttgattggcgctaaacctcagcagtacgccagcacaaaagaaaaagtagtcaatttcccgtggcaactggcgattcagcacgactccgggcacttagagcggctcaatcactacggtttcagacggaccaacatggcgaaaaagcaggtacgcgggcgtcctgagacaaagggcagactagtttgggtgaagagtgaaaataagggttgacagcttaggccattcgcgtagaatggccctcaagcaaagggaaacaccctgagcaatcacgaaggataagtagatatgaaagcgctttgtaatcatcgggcactctacgcagcttacagccgtagcgagattgatcgcgttgcggtagacctgaaccgttactttcctatcgagaaagatgatgaatgggaagatggaccgtacatgtaccgccgccggacctatctggtgaagcattcgaagggcatagcaaggtggcacagtctctattgcaatgggaccgtccaaggcgttggcgtaatcttcgacgtaaagtcgggcgaacctttccgcacagcataaggagattcagaaaatgcaagcttgggatgtgtatcagaacggccaattgatcgatactgttttcttcgatatcatgtgtgatgccgaagaggtgcggaaatcgctggtcaatcacgacggatactcgtctgatactactgtagaggaggttgagtaatggatagtctatctgttaaaatcgttctgtcggaactgagctacaaggctctgattcaagccttcgccttgcttggccgaacgctcgacctagacgaggggttggacgatatacttaatcttattgcggatgagatcgctttccgcgacggcctgccgcctttcgcagacgactgcgataaaacagaatggatgctccgtcgatgggaatcgctcccggtggtatcgtacaatatcgggcaggacggaccgattgtcgctcggtctatcgaagtaaaaacggcatgaggggagaactgatgaccgtcagagtaggagatatcgtggctatccggggcgacattcggaaaaagctcgacggaacatgccaatacacgcccgaacaattggtaggtggtaaattcctcaagcatgccggcacgggagaaatatggactggccgagtgagtaagatacaaggtgatatggccaaggtgggaggggcttggcgcgggatcgaattctatgtgctcattagtgaaataaacgcttgacaacctgacccactagctgcaaaatagcactcacagacaacgaagacgccgataggcgaggagaaagcagatgcaaatgtttttcaaaacccgcacccaagcccgtgcaatggccaccaacggtcgcaaagtggtagacaacggggctcaagctgaaaagcgctgggctgtcaagctgaacaaaaaggaggcgaaataatggctaagtctgtcagtgtagatcgcaagcgttccatcctcgacgaggcgaaagacggtagctttttcagtgtggaattcgtcaaggcagacggcaccgttcgaaagatgacgtgcaagcgccagattaaatcggcgtatgctaacggacagtatgccactcgcaaaccgaccagcgctggcaagccgcacctgtataccgctgctgaggtgctgaacatggaagagggtaaatccgctttccgtacgatcaatctcgaaacccttatccgtgcgaaggtgaacggaatcgagtataaattcgattaaaagcttgacagcctaggccattcctgtagaatggccctcaagcaagacaaacttaaacagaaaggagattaaaatggcacgttctatcaaggcttccgacttcgattccgcttaccagttcgaggccgccaaacgttccgaacgtaaagagtcccgcaaatcgcgtgacaatcgcaaagctagccgaggccgagctttcgacttcagtagcgatatgtaaggtttgtgccctgccggcaggcttaaatgccggcaatcctaagcccattcgtcgagtggttttaggattctcaaccccagcggagataccaaaaatggttcgtcaatgcgtaccctgtcccgatgctcgccatgctttttgccttgcatggttgttcgccatgccggagttcgccggtctgcccgctcaaaaggacataaaactctttaagacttcgggacaatgggcggtatgttatggctagacgacagcggctcccgtcgtgggttcaagaccagaccgaggatgaaacgccgctgagggacaggatagacccctaccttagcaagcttggcgaagtcgataagctagagggacaattgcgacgggtcagggatgcaacggacccggacgaatacaacgaaatggctaaggtactaaaagcccgacgccggaagataatgaagcaacgtgcccgggcctacggtctgccagaggatgagcctaccaatgtccaagggtacagcgtaccggaagaggttcaccgtagagccatcctgttaagcagtgtaaaaccttggatgttctggaccatcctgtctttctcgatttttgtgtggtttgttttgaaaaacagttgacaaggttcccgcctcctgtagaatggtcagcaagaaaggcggacaggccgcctagctagataaaggataaccgtcatgcacttcgttcttaacctcgtttccaaaaacagcaaaaccggtcccatgcctgttagcacgtctcataacggcacctgcccggatgcctgccctctcaaggctaaaggctgctatgccgcttatgggcctactgctattcactggaaaaagctaagcaagggtgaacgtggcgtagagtggaaagagttccttaagcaagtgcggtctatctcccgtggggatttgtggcgtcataatcaagctggcgatctcgtgggtcaggatgacgttatcgatgggatcgccctgatggaactggtgaaggctaacaaaggtcgtcgcggcttcacctacacacattacccgatgaacaatttcatgaaccgccagcacgtattgtcggccaatcgtagcgggtttactatcaacctgtcgggcaacaatgtagcgcacgccgatgaactggccgacctgaacatcgcccctgtagtgactattctcccgatggacgcggagaatgtaagctttacgccgaaaggacgtaaagtggtagcttgtccggctgagaaaagcgacaaggtgaattgtaagtcgtgcggcttgtgccaagtggccgaccgggagtatattatcggcttccgtgcccacggcacagcaaagaaaactgtcgatctcattgctaagggttaacacaatggacgaatctgtttacgcaccattcaatcagtgtaagatgatgggcctagaacgaaccgtgcggagcctagcggctcctaacgggtgcaaggtagtcttgtatcaggaccataagaacaagcatagaatcgtcatatacgatgccttagggcatggaatgtctggggtcatggtgcaagcggatggggaaattcactacaaggaaactcgcaaggctagccaagggcagaatctgacaaggcagctacaagctcagctaaccgcatggggagtgaagtggttcccctctcagtatcagacagcggcgggcgcggcctgctacaaaggaggcgagtgatgcggcagcttaacaaatcccagcttaaggccttggggcctaagatcgacctagccttagagctagcttctactggccgtggtggtctaatgaatggccacggctctacctgctacattgcaaacaaagccgggcataacattctgcgggttagctaccataactcccgattcgttgcatatggtgctgagagtgtccgggtgactgggaatgtcattgcagcatgggtggaatggaagggcattaaccgggctgcaatcaacgctctgagtgagtacgggtatcatcctaacctgagcatagggcacaacgatgctcttaagactctgcgtgatatcgagcgttaccagtgacggcctcttactcgacagagaaacggggccagaggtgggccatcatccgtactgagcccggttacagaggtgaccgggtgaccgtgctaggattctgtatcaatcaaacgcacgctcttaaaacggtagccaaattccgggcttggcaagcgctaggctggccctacacactgaaagatgacagaaaataaatgcttgacagcctaggccattccagtagaatggccctcaagcaaagggaatcaccctaagcaatcactaaaggcaggaacaatgaaaaccacagagcaacggcaagcaatactccccggggccgccggcagtcaagcgacgggcgcctactacccgatttactgggatgaccggggctacttcataggcccgatgcgtcactggaaaatttacaatcgctgcgtctgaagcatcaagccatgcttctaataaccaaccatctggagactcaaaatgaaagctgtagcccagttcaaaagtgaagactacgaaagcggtgatagccgtactgctaccgtctatgaggatgtttatggatgctacgtcgtgagcgttttcggaactagcttgagcgaacctgtcagctaccattggggtccgttcgagtataaagaatctgcaatcgatgccgctaagtctgctatctaactgaaaaggggccacagaatgaaaatctccgctattctgaaaaataacctgaagttttacaagaataattcgttcatgtgcgctctggcgttcgataatgtgtccagaaataaagctaccgaggtgcaagaatttatccatcagctactagggcccttcgttaccttgcacgctaagctcaagaaagagataccgggttacgaaagagccgtatatgatgatgagccagaggatgaaatgactttctttgtatcggatagggcctatcaaatgcgttgcttgtggtgggaaactgtaatcgaacaactagaggaacaagggcaatgactcaagctaactggagcaaaggcgtccgggttgtcggcggaaagcgggatggtgagattaccctgttcacaagcgcacacttcagtgaatcgctaggcttatgcgagggtgatccttatctggtagaggctttgccgatgcccgccgcgctccggctgctagtcaaatggaacaagctgtgcagccgaatgaagcttgactatcggtatgaactgctgtagtctgcaatctcaatcaaaacaggaatgctccaatgtcgattctagccttaaccctgaccctttgctctgccgttcaatgtgatgattacattatcgatcactcactcccgggacaagccgcagagtgtaatgctcggctggtggaggaggccgaggagtggggcgatgcttgggtatcaactaacgctgatgcccgactgacccgctaccttagccggttcaatattcaagttgaccctcgctttgttttcgactacgattttacctgccaactcatcgcagaggatgaactaccatgaacgcgccccatctttccctcaagcagtaccgtcaacgtgccgctgtcatcgtccgccgagtgaaatactatgaaaggcgctggctccggaccgtagagtttttctcaggtgctgccgctcagaacatcgcagaacgctttgcctacgctgggcatgctgaagagcaaatgaccaagctcaaggctgagtttgcagccttcccggtggaggtgaggctagatgctctaggttggatcaattggaatactcacaatgacggcctgctagaggagtggattcatcaggaaaccgaccgagccatcatgctcgaatatgacgaaaccacgtggcgtcctgtagcttgctgggaaaccactgtcgatgctcttcccaagctggcaatgctgtaaaatatcgcccgttaggctgaaataatgcttgacgggcgtttttgtacctgtagaataggcctcaagaaaggaaaacagccgaaaggctcaatctgaaacccggagatcgataaaatgctgctagttcatggaaccactgcaaaaggcctgaaagctatcatgaaccgtcgaggcaaggagggattggccgcaccttgggacgtttcggaccatgacggaatgtcctacttttacaacgtaggcaagatggagtggcacgacgaagaggagtatgctaaggcagaatgcatcgttcgttgcctagaacaggcccaattgcagcaggctatgatggccgaaggaggtaaaatctatgctctggtggttgacattcccgaagagtttcaggattgcgtagaggatgattattcgtgccctaacgctagccaccaagctagctgttttccagaggataattttgatccggcatggattgtagaagtgtatgaggcagatgtgagtgtatgggccatccctttcatcgtagccggagtctcaggtaattctatgttccaatcccaccaactacctgacaaactggtggcgatagcggagtcggtggcgcggtccagtgacatagacacatacgaagctttcgagatcgaccattcacaggtggagctatctattctcgaaaatttcaaagataacgcttgacagtctagccaactagcgtagaatgcctagccaaggggtgcataagcgccccacctcgaaaggatacagaaaatggccatcgttgatcgaaccgcaggtaatgaaagcccgaatcactgctacatcgttactggcagcattggaccagagtttgagccgaccctgttcactacccatgcgctggcaaagaagtatgcccagcagatagtgaaatacggtaaagcaaacgacgttttcccgccttttacgcctgttatcgagacccggcacaaggcagatatgaatcggttcactgttcacaacaaaatccccgaataggagacgtatctatgaaactttctgaaattttccaaaaaggcctgaactatgcaattgagtacggaatgccgtggtatatgtgcatccgtctccgggagattcatttgttcccctcgcccgttgaaatggcagttaactcggtcatgatgtctgccggtatctcatcaaccccagagggatgcgaattcgccggcgttgatgactatttcgaggaaagcggcctagcagccgcatacaaaatgaacaatcaggaaatgtccgaatacgggcgctcatcctacgcaatgtgggtgcaattttggttcttcgtaatctttgacttagcccgaaaagggcagtagaatgcattacaagcgtagaacagccagcaaataatgtgatctagagggacggtcatgggtgacaaaactgtagtttatcgggtggagtgcaggaacggcgagggaccgtatgttaactatggtatggagattgatacgtcctccactcccgagcggcccgtaccggagcatgacgggatacctgatgttcgccattttgagtatttcgccttcacgtctcctaaacaactagatgactggttcggggactactacagcaatctgaccgagcactccagcgcctcaatcaaaatgtatgaggtggacaggcagcatgtaaggactggtctccggcagtgtgtattccgcagagatgcggcggtttgcgtcaaggaaatgactattgaccaatgggtaggcctgcttaaggctggcatgatctctgcggtagtcgtacaagctctggccccgatcccagccgaacaactatccctagacctaggggacgatccggcctgtgaggctcagaaagaaattttgaaaatgttcagtttatagggttgacagcttgggccattcgcgtagaatggccctcaagcaagacaaaccacaaacccggagactcaccatgaacaagccaatgaatactttcgcatacgcccactacgtcgcccgcatggacaaggcctctggcactagcctgccctacgccaccctgttccgcatcgccctgcgtaacgcctaccgcaagccgggtgtccgccagtacgattgtgcagcactcgtcgaggatatcaaagcgcgtgaactggtccaaaagcgcattcgggctgaaaaagcagtagtgatggcggcagtaatgcgtgcaattcgtaccggcttcaccgttagcgtgaaagatggcagcgatggcgagtgggtagtgaaaaagtctaccgatatcaaggaaatctctgatagcctgcaatctaccgacgaggatatcatccgcttccgcaagggcgacggcccggacaacatcgtcggctctatgtgggcaatctacggtaacagcgccggcgaagtgatcgccgactggactgataatgccaccatggccatgattatggctccggctgagcggaagatggaaaaatacgctgaattaggtatctaatgcttgacggggcccgaaaagggccccataatgcacccataccagcaaacaacatcaggaccgccccgatgagccagatcaaaatccaagagtatatcgtagccgagatcaaggttaaccattgcgctcacctgcgcaagggccagaccatccaagcccgcgatgctcgtagcagtgaaaagtggattgcattcatggtggaacgcgggtatagtgcctctgaagccgctatcctgttcaaagatgcacatgatgtggcaatgctcgaactggcagcctgaaaaaatcctactaggagtactgacaaatgaaacgccaatatactgattcctaccagtgcaaagcaatcgacggcctgatgtctatctgcggtggtaagaaagctatcgtacaagtgtggccgtccttgaaagcctctcgaaaccgccggctgaaaaagatggtaaaatacattgcccggtcaggatggaaaccgtaaccaactgattatcacagccccggcttgccggggctcacaataggagataaaagcatgaataccctgattatccgtttggattccgcctacagcgttcaaactgtccgtagtttccttatggaagctgtagagagtattcgaaagcatatccgggactacgcggttcatgacgaatacgattcgggattgagcccggtagcacccaatcatcgacttgcaatcgtcaccttagacgaagattgccgagtgtttcacattcaatgcgagtcacctgatctttatctggcgaaccctcggatcgtgtttactgatgttgaaagcccggcatataccactcccgtgaacgagatcgaagagtatagttacatgaccgcatggcagcatatacgtcaaaaagatatgacagcaaaagactacctgtcggattggtctatccttttcgcctcaaaggagaatgccattgatatcgacctgcgccccaatctgaaaacgcaaatcttgcattaactgagggagctaggatgaagcttcgaaccatattcgaaacctacgattgccgagttaggtttgtcaccataaccggcgtgtttgtggaatctcaaattgtgcggagtttcggtcaagctcaggagattgtatcactcctctgcaatcccgcagatactggtatccgtctatccttcttcgacgaagaggagggctgcgagtcgatcctctgccgattcaactacaaaggagaaatcatcaaatgaataacaagtataaggataacatcattgcggaatactgccatttcgacggcagacggccagtcctttccttggcggcacgatgggtccaccacgacagtcgagttgtgaagctggcagcgctctttgcctgtgctggctatggccgtccttacaaagattgtattaaggcctacaaggacgccaagcagcgggaaaaggatatgcgaaaccctgccaaatggaagctgagccgagcgactaagcgggctctacgggctcgactagtggctatagaaaaactagaataatccggaaaatacctgttgacgtgaggctagagggttccctatactgtgcctatcgagacgcacaaggcgtctcctaagctagaaggactagcaaaatggcaaaggcaaatctgaagttctcccgcattggcaatgacggctacgactacgcccgcagggaagacggggtttggtttgtcagagaagggtactacgggcggtacggctgggctaaaaccaaatggactcaagttcaacccggggatggcatgactatagtcgatgcctgcctgaaggctcacgaagctggaagctccagcacatacatcggattcgggaatctggtggtattttccgacgggaaggggctccgtttaccctgaacaggaactcaaataaagttgttgacagcttaggccattcctgtagaatggccctcaagcaaagggaatcaccctgagcacctgaataggtaaaagacgatgcaagcaacctaccaagccctgaaaactctgcgcgatgcttgtgaagctgtcaaggatgaaaaaggcaccatcaacggaaacaaattgaatgcactgcgtaacaaggctgtcaaggaaatgcaagctggtggtgaaacctactctgacgccattagcatggctcacgacttgattaagaagtatcgcaagtaatcaatccgtaacaagccccgggtgaccggggcctctcataggagagaccatgaaaaacgttcaaatctgttgttcgaagtgtggagccatcaacggcggtaacagcaaacacaattgggttatcgcattaggcaagaagtggtgcggtcattgtgggtccaatctcacaacccttcgtcgctaaccattcactgagacctaatcgaggagagatcatgaacgccactctggcacgcctacagaacgaacgctgtgcaaccctccgcctgatgctgctgccggaacatcgtgggtatcagttctctggccatccttgggccgagcgcatccgcaatctccacgatgaagccaagtgcatccgcagccatcactaaaccgcactaatccattaaaactctaacagcccgccttgtgcgggctttgttctatctgcgaaagcgacagctttcaagtgtaattaacatgtaatgttgtaacactctgtagaggtaacaccagcatgacaagatagaccacttgtaacgttgacgttacatgtataacagcatgacagcgaaagctgtacagatagcattctgtccagttcacccctatcaaataaccccacaataacccacctaaaacctatcggttttaagcggcctgtaaggccgtatatgaagcgatagcttcgctatgttagtctgcaccatcaaggcgagagccttacagcatgaggcttgtaggaggttttaaggccatatgcgattagcataggatgttggttgttttaggtagatttttggtataacccctttcagcgctaccattgtcccggtgatgttaagcgacagcttacatccgctcccattttgcaatggaaattgcatacagttcatcatgcgcttcaaaagtgacttcactttgcatgcggatgcatgctatagtataccctgtgatagctccgctatcccgttttgcatggcacacgaattgcataagcatgacaagggtaaccctcgaaagcggagctttcaaagtgtaggctgagtgtgggctctacctctattatatttgcgaccggaagtagtgacactgaaaacgttgactctagcccagtaaatacgttaaactaaaaggttgatagctgccgctatcgagtaaccaacattcacacaaggaggcacaatgacaagcaacaatcatgccaagattcacatccattacgctaagcaaatctactacgccatgcgtaaacgtgccatcgcaagcgatgagatatgcaaggaatgggccaagcccaagacaggctttgaagcgttctatgattgggtggtgaatgtgtcagggtacgccgtaggctaccgcctagacaggaatatcctcttcccgggaaacaagctctatgctccgcatacatgtgagttcacacctacatacatgcatactctattcaccaactgcgacaagacaagcaataaccgtgccaacaatgatctacctctaggcgtccgcctagcccgtcatgacaagtacggaatgccagtatacgtctcacagtgcaggacactaggcaagcagtctacccttggatcgttcgacgatccgatgcaagcccatgcggcatggcaacatgccaaggtagcagccatcctcgaatgtattgatctctatcagatggaggatgttcacagtgtaaacgttgttcaagcgttgcttgaaagagtggacaaacttggcaaggatattgcacagggaaaagagacaacccttttgcaatgatttgatggggtcgatggtcaaccctctgagagtgcgagaactccgccagagtaatccgatagcgaagctatcaaacgtatatgcatattccatgccaacatgtggaaagatttcacccggcagggcgggagcccgttggcattagttttgcatagcttagctgtcgctaagaaggaaagaccacggccacccattattttggatttactaaggg

SEQ ID NO: 66 - DNA, 94052 bp, synthetic construct
  source 1..94052: mol_type = other DNA
gcttacatccgctcccattttgcaatggaaattgcatacagttcatcatgcgcttcaaaagtgacttcactttgcatgcggatgcatgctatagtataccctgtgatagctccgctatcccgttttgcatggcacacgaattgcataagcatgacaagggtaaccctcgaaagcggagctttcaaagtgtaggctgagtgtgggctctacctctattatatttgcgaccggaagtagtgacactgaaaacgttgactctagcccagtaaatacgttaaactaaaaggttgatagctgccgctatcgagtaaccaacattcacacaaggaggcacaatgacaagcaacaatcatgccaagattcacatccattacgctaagcaaatctactacgccatgcgtaaacgtgccatcgcaagcgatgagatatgcaaggaatgggccaagcccaagacaggctttgaagcgttctatgattgggtggtgaatgtgtcagggtacgccgtaggctaccgcctagacaggaatatcctcttcccgggaaacaagctctatgctccgcatacatgtgagttcacacctacatacatgcatactctattcaccaactgcgacaagacaagcaataaccgtgccaacaatgatctacctctaggcgtccgcctagcccgtcatgacaagtacggaatgccagtatacgtctcacagtgcaggacactaggcaagcagtctacccttggatcgttcgacgatccgatgcaagcccatgcggcatggcaacatgccaaggtagcagccatcctcgaatgtattgatctctatcagatggaggatgttcacagtgtaaacgttgttcaagcgttgcttgaaagagtggacaaacttggcaaggatattgcacagggaaaagagacaacccttttgcaatgatttgatggggtcgatggtcaaccctctgagagtgcgagaactccgccagagtaatccgatagcgaagctatcaaacgtatatgcatattccatgccaacatgtggaaagatttcacccggcagggcgggagcccgttggcattagttttgcatagcttagctgtcgctaagaaggaaagaccacggccacccattattttggatttactaagggttagggtagcgaggtgggttcgtggttaagtagctcggaaataaatccataactggcagaaggcgaaccagcagagggcaggcccgctccctccattattttcccagcagtagaggaggcacactctacaaacgtatcactctattcggcgggggtttaggattcgaatatacctttagcggctaaatgccatcattgcttatttcctattttcgtgctataatccttataggatgttcttattcttcattatagctggataagcgatggttgtatagattcaccacaaatagaaggaatatagaatggaagataatattcaagctccgcttgcagctagtgcaggtggcaaattcgcaactgtatacgaagctattgtcgcactcggagtagaaggggctgccgctgtgtacagggtaggtgtagggaatagattgacaacagctagaccatcggcgtggtaaagagaagccccgggcagcgaaagctgatcccggggctttttattgccttgagtttatgtatgaagagattccagttgtctctgctcttccatatactccctagtggcgtagttcatcatgaggttgcaatactcttcgtttatctggtccatgtattgcaacactttctccatgctctggcatggactaaatccattatgacggagaatcttgcttagattaccctcattccagaagtctctggcccaagcctccaaagctactgcgtagaggcttttgatgcacccgataggggatggataccaatattgctcagacattagaccctccaaacgcagcaaacaccccttgcttagctaggatagtctttagctcctccagtgaaatggtctcgtctcctacgaccacatacttgtctgccttccctagagtcatcacacacttagtctggaaggtaggccgatacaagtcatacacatcgggttgccacttgcttcgcaggccagttccgtagctaatgaaccggtcttcgggatgatcccggatgtataggcaccggggactatcatctggcccatctacggagatagggtgttccatccactccctgatcttatcaacgacgccctctcctaccttcaattgagcgtactgacagtactcaaggaacgcatcaaactgttcggcagtgaaattgctgacatcgatctctttagttttcattctcttcctccatgtctgcaatgatttccttcaacgcttgaagcgtgtaggtgccatttagctctgtagtaggaccagtgtcacactcatgaagcgtgtacgcggtcactttcttctcagtgacgaaatggaagtctacccttcggaagtcgtaggtcgatttcgagtatccaatggcctctttgagttcttcctcgtaccacaggaatgtcattggacttccgtcgcttttacgagtgtagtccagcagattatctccaacccacagtagcacttgagccttgtcgtacatgaagccgtttccgctcccaaactcgataccataagccttaaggtgctgttgtactgcaatgttctcttcgggggtcttcacaatagtgtaaaacttcaccaaacgctctttcaatttcagtcctcctgtctgtgttttatgggagtgtaaaacgttcccagtccattgtcaagccttctgtggtgatagtctgttccagacgctctctagctccttttagaatgatatcccactcatctccttcttggacccctacatacttctccatcatcagcgcacgatcaacaagcccagctctgtagttctgtcgctcttttctacgcgatagcactcttgagatatggtccttcttcttcgccaacacgctgatagctttccttgccataagagttgcatactcgctctcctcggcggtcatccattcctgatacagcagccctagacgagtgtcatgctgtacgagtggaaggtctttccatatgatacctactcgtccagtatcagagacggctttccattccagcgtagtgccgccggtcttatagtcggtgatctttacattctccgagttagattgagactggaaagcgtgcctccagtctcggtatacagtccaccgtttccagtcgaagaatgtctcacagatggctttaacaggttctccgattttaccctccagttctttcaggcggttctcctgctcagcactcatgtatttgataggtcgggaggctggatcgtagcactcctctacctgaaactcctcagcccgagactccaacactttaggctcatcgttactttcttcctctcggaaccatgcgaacagcttcttaaacatattcagtcctcctctcctgtgatagctaccctagtcagtctccacacttttctaggtagactaacgaggaatagcatagccataaacggtacggcgataggccagaatattccagctaacaccgctcgggcctctttcttacgcctctccgtactttctcccctccacccaagaaggggtcgtagagattcccatacgaacatccctatcacagagtagaacaataggcagaccactccgacgactatgcatactagaatgagaagccctacttgttccatggtgcgatcctcttaagtagtttacggctgttccagatagacagagcccacttaggtaacaacaccactttcaaaacgctgtatgttgcgtagagtagcagaaagctagcatacactgtgaatgtaataggccatagcagtcccagtacaatggcaaaagcctcgataccctctctgtgatctttagtcgcactagctgggaagttatctttgaaatactccgtgatacccatgtaggtccacatgaacgcaattccccacgcgagcgcgaggacgaatagcattgggattatctccattactcccctccttttcgaatcaagtcgaagtaggcccacacgtagaagttgcaccacgctctgcctatggcccagccttcccaatagtcttcccagtccttgttcggagggttattctcgaacatggataacacgcatgaatcagctacttcgtccaagaggtgcattaccgaattaagcggcccgattccaaaggtcttatctagccaccccttaaatcgtcccacgtctgagacggtgacgctggagtcactgcacagtgccaatctctccagaatgtagcacatgtaaggctcttcttcgttctcgaagaatgcccgcatgccttccttgattagtggtgcaatactattagagttcattttccctcctttcggatcaggtcgaaataagaccagacataaaagttcatccagttcgtctcagtgtctcttagacaattgcgatgaagataagagataactgattcccacgacgtaatcccgtgctgctctattagccactctctgaatgaccgatactctccgtgggtgatttgcccttcttctactaggtcactcaggatataacacatatatgtgtcccgggcgtttaccgagtaatcttccagtccgatctttatcaactctgcaactgatctcattgtttcctcctctgagagccccactagggctctaaatttttggttcgacctgcggtcagcacatcacaacccagttgtacaggtcggcctcctcataagctgatgggtagcgattgtactccaagaagaacgcgtggtcaatagctgagtatttggttgcgaaactcgtaatgtaagtcagaaacccgttgtcctctttcctgaacagggcgtattcttcagtaccgtccttaaacgtatctagcgagatagtatacttgtcgaagatcacagcatttcctcccggctaatgtagtagttgtagttgtcctcttggacgaggaacgcacgatagaagcctttctcaaagtctcccttgaccagcaccagattgccctccaccttgcatgtatagatatacatggtgtttgctactcggataacaggatcatccccgggacgaacatccagagcagagagcatagcctccattggcatgcttgtcaagtgtgcaactacagccgagcagtattctgcatcgcggccagaagtgtcctctgcataagcaggagcgaccccgcacgaatgcagggcgagtgtaaacgcaatagctacgagtttcttgaacatactaaccctcctcttggtctgtctggggaacatccggctttgggtagacgaatgtctctggatacttcatgcatcttagctcatctttgcagaacccgtcaatcaatttctcatgtgcgaattccgcagccttgtagtagcgattagcctgtcttgcctccactcgaaggaggtggcttatcgtgtgagcgttgatattactaagacttgcaaaaattgtcaagagcttttttgcagaaagaggaatcgacctttcatcgggtctgtaccagtccagccgggcaactccttggagaacgtcgtctacccacaacgggtagtctccgtctagctcgaccatgacttcgtacatttcaggctgaacagcgttgaaaaagaaagagggctttcgccctctgctggtatctagaggaggaacaagccccctctccaccttgtgaatcaaccgatcagcattcgcccctatccgagactttagctcctcgatctcttcacatgtcaacatacggagggcacaccttagatttctcgatagtgaacacgccttcgcatgccaggttagcaggtccataccacttgaacatgttgttgatatcgtatcgaatcaactggcggaacttctgcccgtcgcacatatccacgtcgaaccacgccacgacccatctgacgtaatcttcagggtcgttctcttctcgccatctgcactctagatcaacgtgactgggctctagaacgtaaatgtcttcgaaccctgtactctggttgttcttaagtcggatgattcgagcgcgaatccattgcatgcacctgcggtttgggtctgtgatatcgcagactaccggaacctctggaacctcaactgtatacatgattgtacctctatttgttttacaagaacgccatgattctgtctctgtctgcatggcggtacagattgaagcaaggcacgcctctagaggacgccagttgccaagcggtcctagtcccgccttctggaatcccgttgtggtctgtcttgctccagcacaccaagaacttgctaggcgtgttgagatcgattcccagcacttggaaaacgttccgagtgtgggctcgtcttgcgaacgggcttagaacggacctcccgtcatttctgacagagttccaagccggatgaatttgactggcaatgcctttagcttcttcccattcagccggcaactcttcctctggcaggatggtagctccgagcgtctccgttatctggtactggttgaagccgggagacggaagatagatttctgccgtagttcctcccttgttattggatatataatccagccagcccgattcgaacgctgagtccgctcccttcgctcctcctgaccgaagaataaaaccttgttctgccagtttacggcctacctctcgaaggatgccccactctctgtttggcgtatccctacttccgactcctgtgtaatacttcataagatcaccatttcggatagctcttctggtgttacccattgatgccggtattctccgttcttcgggttagaatattccaatagaacagggtaatactcgtctcggtaatcggtgtctataacctcgcagttccaacctacagggataggacaagaacgccccttgggggccatcttagttccaatagacaacctgccttgactagccgcctcattgacgcttatcaggctgtatctgtgttttaacgcttcaactaccttgacttggaggtctaaaagttcctcgattgtaaagtggcttacatcgattgtcatattactccctcccttccagtttcttgaattctttgtccagcttagctagatgcttatccaacttgtctagctttttatcctgataaagctggaaagcctccgagcccggggccaaccaagtccccttatacttaattgcaccccggatcatatctcctcctattacagttcgtaaacgtatacctgaaactggccgagcgtctcctcgataagaggctcgacattgctccagtcctctccggctaaaccgcagccaatcttcggcagacctacacacaactccgaggtaggaatcgcccgagcgtcagcctctgcctcaaggaacagagacatagtgtacagggcttggcccagtgcgtcaagctgagtgtagactcgtccctcttctcggccatagttgtactgcccgtacagattgtaaatcgatccatactcgttaattgtgaaggtgagggagccgagtttgcctcgatcccctttcaccgttgcttggtctgcctcgtaggcctccgggaattgctcccggatttgcttagcaatgccgctgcccatggtgttgaagcaattagcctgatgtgcaatagcgtgcaactctttgtttttgaacgcggcgagcaggtcgccctttcggtatttaatcatttgaacctctctacacttgtgaatctgacttcagagcctctcgctccgtgagcaatgtccgcgtacattgagttaatggcagcaaacggggaccaatactccttctcccagattttgaacttgaacattttgtgccctttattttctgggcgaccttgttcgcagaaggttgtaaagtaatatttagctaacacctttatcctccttatactccgttcttaatccgataacggatagatgccaagtcattgttcttcaggtcttcggtgtcccatttcccgtctttgaagaacgtccgcaaggaaccagtagcctcctcctcttcagatacattatctttcaactggaggaatcgcccattttgcaggtctcggtacactttcaggaggcctttagccgacttcttcttgctgtcagttttcgggtctttgaagattgcaatgccttcaccgttcacttccgtgtaggtagctttcactgcgaatccgaaagtatcccgggtgttgcactggtaagtgtaactgccaactccaaacactacgttcagggaagcgaaacctttctccttcaagcgctccaagattttagctgctcggcgagttgtaatggaatctccatagatcaaaccgatatgagaatcgagcatcttatagcctgcttcgttcacagtaccgccgaaggtttcccacagaacttggatagctcctttcacctgcgcctcgctcacttcttcaagtttatagccaattacatactcgtattgatcccactcagtgggaataaccttgaagtacttatcttcaaagttcagaacaaatgcatcgtttccatttactgcatccatgatatcccagtgttcgagcgactcgacaacttcaatatcacccagtccgcagataacctctacaggatcaccagagtctggacgaacaaccagcttgccgtcacgttccatgatctgatccttgatggacggcagaatgtcagtaagcacgccccagaagtcgaagctgtctgccacgtaagacagaataccactcgggaacttacccatcagttcaacaaggaatcgacgttctgcttcctcacggccacctttaccttctccatccttcatttctttctcaatgcggaggatgttactagtagctacagcgtgttcagtcgcaggaacggagcaagctaccaaaccagtcgcgttatagtagtcctcagcataaatagctgctgccaatgtgtccgaacctacgaacgaggtcaagtgaccaacaccactacgggctgcgtcttcgatcccgctcataccccgggcactgaagtcgtggaactgaacggacagcaggaagtcgtcatagcatccagtgtgattcgcgtagtatcggcccatagctgcgtattctgcggcgatagtggcgttagtcgcggtcttccaagtcatagcagaaatcagtgtttcgtggtagttcactagccagtagaactccggcagggtgttcttgatggtgagaacaggcacgcccatcggtacactgacgccttcagtcagagacttgacctccagaggcagatagccgagcttgtgtagggctcgaagctgctccacagcctccatttcccggccaaaatagccagtcaggaaccgggcataccggccaacggcgttctcttcttcagccgcgaagaagccttcccaagactctacgatctccatccaagcggcccgtccgccgacccacttgagagtgccgtcgtagaagtcggtggcatgcgtctttcgataaatcttatcggagcgaggggtcaggttgctatagacaagctgagtcccttccgagtacatggaaccgtgtccaatcttataaccatcggtggaaagatgtggcagaattttcatgttatttcctcctgttgtgttgaataggcccagactacatcaatctgggcctcctgtcaatattcgacttcttctactggcagcgtcagcacagggtagatgcatggaaggcgcagcaatggttgcttcttgctgtggaagtcttcccaaaacttatcgtgcatcgtcttgtaccgagcgtccagttcctccttggtgtcgaactcctccaccttgacaaccctcttctctggagccgaacgcttatactctacaatccagatactcaagctcacaggcgttccgccttggagtattcaaccggaatgacagtcagcgcttcgtgctctttttgagggagcgtatccgaggtgtagatgcatccgaaggaatccagcaagcagtcgatacccttactgaagattccatgagtgacgaacaggtcagggagcactttactgtactctcttagggccttagacacgcttcggaatgtagcacctccgtcacagatatcgtcgatcaccagaagcggaagttcaggatcgatatccgaaggattcagaatttcaaagccttcgattttaccggtctggagatcgcgcttcttattgcaacgaattacagcggctgctccggccttctttgcaaaatcctcggtccgctttgttgctccgatatcaggggctacgagttgatattgctcccactctgaacggctcagtaggccaccgaagaccgaagattgacggacaacttcgacgttgttaatcaggtgcagagttgcgtcgctgtgagggtccacaacgataactcggtcatatccggcagagttcagcatgtttgcaaacactttcaaactgaaggcgtcgcccggattgcaccgacggtcttggcgagcatacgggacataacccagcagaagagtcatgtgcggattaatcatttctgctcggatcgcctcggtgacgttgagaagagccatgatatcatcactattctgaatctgagctttaacgtttacgaacgcatggctttcgatgccgcccacattaacgcccacttcgccgcccgggaacgtccacacttttgcctcttgccacggacggctcataacaccttccatttcctgaaggcaacctacagcataactaatcatacatcctcctcacagtttcacagagaagcgattccgcattgcttccatcgtgctctcgggaacatcgtgtacagacttattcccatgacgattctctacaatcagagagataacagtgtagccaaactcttcagccatgtcaatgtatggtgctacctctcgctcccgggtactagtattggatacgataaccgcatctagtcctatctccatagaccgtcgcgctttgtccatgcactttttgtgagattcaactaccctctcagctttccacacatacttgccgaactccatttggtaatcgtccgcttcgcagatagacgcctgccggcctgactcccaagttttgttatacagaatctcggcaagagaggacttcccggagcccgggagtcctcgaatgatatacatgatcttttcttgcatacttcctcctttaaattcgagccatatcgaagtaggtttcgatcagaagtcgtcgctgtgcatcggtcatttctgagaaccgagcctcatccacttcatttaccaagaagtctaccagaggatagaactcttcgtcaagcgtctgcttgaatccagccgggtcttggtacatcgcattgaccttcttactacccatcctcatgataaacttcttgccgaggtagtgagttgacttgcacttcactgtccctagccctgtttgtaccatgtaaccttctttctcacaagaactcagaagaccctttgcatgttcccagctacactctatgtgctctggacgaagaatctttacagaactgtggtccgttacacctagggcgtgagagtcaagaatatattctgaaagctggcccccagtgaagatatcgcggataccgatcaaatatgccccttcttcttcctcgacaatgtgagggtcgtctggagagcatatctcgaagttatatgtgaagcctgcgatgtaatcatctgggttattcgacacatacttctgaccaagggcaacgtaatcgccggtcaatgaccccgtagtactgaagataagggagccattgtgcttagtcacggagaacatgaatccattcactttctcaatcagccgcacacggaatttaggatggaggaaactcccagcaccattctctcccagattaaacaccttctcgaaggggcgtacaatacaatcaccggagtgctggtcaaatacatgaccccgtgcctccagaagaagcgggtgcttgttccacaagttgtcgtagaataccttacgagcgtatttaataaccgacataccgttgaagtgcttaacagtcaccagcttattagcgatcaggtctttgtacatctcaatatggagtttaccttccatcctattcctccttattctacttctacaatcgggcagaatttagacttcttcgctttcaaatacgacaagaaaatcccatcctttttatcgggcctcttagacatcagtcgagcgagccgatagaagaccgatacaccatagaatacagccgctacggcaatccatataaaccccataatagccaaagtcccgcctagaatgtagccggtcgcgggtccaagtagcagtgcatacaggctggagcctataaccgatgcaaatgcgactgaactgagggctagccacactacaagaaagaccgtttgccagaaataagagcagagagtaacgctcttccatccgctggaaatgtccaagtaggtaggactttcgaatttacgatgcaggcgcatatgccacgaattcttattaatcttcatgcttgttcctccgggaagatgttgaaattgagtacgttgtgctcttcgagttcgaaagaagctaccatcttgtagcctccgagcttgtcaacgatctccagtatactctcgatagagaatttgtcaacatgctgcttcatcagattagagattcgactctgatgagtaccacatctctcagctacttcccgctgagtgaggcccgactgagaaatatagtgtgcagccactgccattacagcctttttgaaatcttgaactgggttgctcatgttaatcctccttattactcagtgtaatttttccgctaaagactcgaaactggctgatctcgaactggtcagtccagcgagcgtcttcgaaagccactccttcgaaagttccatcaaacttgacgtctgaagtcatcagtacaatgaaaggcacgccttcatcgtggatcagctctacaagagtattagccttgggtgtaataccgttttcttcacgtgaaatcaacacattaaccatattatcctctctgtccgtcatggtgatctactaccacaaattcttgattccgcatgtattctctcacttcatcgtaagagaatacctgatgatctgggtgattgtcaatacctacatcaagcctctttcctttggaaggcaagctgccgtgagtgtggccgtgtagatgccaagcaccatgatgagcagtattccacgtctcgaaagggtagtggcacatcacgatcttcactccgtcaattcgaatctccttgtactcacgaatgtcttctacgtgagagagattgctatcagcgatcaacttccacagacgagagtcgcaatggtttcccttcaggaaggtgatacggccattcaactgcttgatgatatccagcacaggctggagcttgttctttcctgcaaatgcgaagtctcccagatggtacacttcgtctacccgacctacccgggagttccaccgagaaataagctcctcagtttgctcctcgaaagtccaaggcctgttgcagtattcgatcacattcttatggaagaagtggagatcggaagagaaaaatacagacattatgcctccttttcaaattcataaatcttgttgatcctgcggatcagtcgaatagcagcccctcccagcagatgctctcgatccggtttcatatgggccattgccttgaactctgacagcatatctcggcgttcatagtggaagtctactacccagtaggtgtctgcattaatcttaccctctcggtacaggtgcccttcaacaccaagccagtggtctactgcgtctttcttcagtaactctttcggagaccacttgtctacaccccgcaacttctcgaagaaagagtaaggacgagaatagttgttgatggcttcctctacagccgactcagcctgcaatttaatgaactcccatcttgcaagaacttctttaatctcctcggtggtggctggggtgtagctgtactgctctttatattcattccacattatactgttctcctacgtagcctttgaatttgtcggaacgggttgtcttcttctgtgccttgttttccagaaccgatgcttccctttcgagcatgctcagttggttgctatacttcttgatccgtttcgcattgccactcatcacagaatttgtaagattggcaatagtgtcgcagattttaacctcttttgcaaccggatgattacggcaaccctcgatatacttccgatagctttcagctcggtttttgtcaagaatgaccagagcctctacgatatgcggcatcacgcccatagactctaagtcctcctctgtcaggtcggtatcctcaagaacgtcatggaggaagcagaccgctagaagggtgtccatgtacggaaagtccgagaaggcctgattcgggtccatatccttcggagcattacgtgctacgcagattgtatgcacttggttcagatggtaggcatacggatagttggtctctccataccgctgaccttcatgggccgagagtgcgatctcgatagcaataccgagctgagttttcatgttaatctcctttgtagaatgtgtggttgcctatcttgatggtacgcttgtacttccgagcccaccgagggagcctgccattattggctctccttacctttctctcgttcaggtagtggtccgctcctcccgttggatcaacagtatacccatacagagcgttgtatgcaacatgttttgctgtctcccacttgtcgggctccttgacgccctgccgcatgctaccatcgcaggtgtacgaatattgacatttgaagtataacactccagctacggtgctgggccacctgtcgtgctgcatcctgttgatgacggtatgagctacagcaatctgcccgatttccggctctccacgggcttcgaagtagaccgcttctgccagcagtctgcaaggctttctgtactcgcacagtgttcgcttgctttctatgatttgagcgggactggcttggaactccactacaggctccgtgccgtattttagacgagagtattccatgtcgaggaacatcccaatgaaggctagaaggatcgacaaaacgagagcttctaaggtttccataacacctccttagacaaagaagcccgccttgtgggcgggctgtatatcactcggctattatacttcagcccaagttgtaacgacgggcgtagtctttgttggggaactcgaccatcatcgactgaatgtgaatgttgcctttacgatccttctggattttggcatttttcacaatcttacaggcctgcgccttagccataagctcagggcttacaaccagatcgatgaaccctgcactccgatacccgcatccggcaggggcccagaagccgtgctgggtcatcgtcgagccgggaacgaggtacaggttgtgcagacgcacagcagtgttgaaactcagcttgctgatatgcttcgcttcccgagtttgggtttcaaaacacccagtcgtgtagttgaatttgtaagtgagagcatccatgaactgaatgacgcttcgaatctggatagcagaagtatccaagagctggaactcctcagccgcgtcgattgcagtggtcacgttgacagacttagcgttgaacattttatatcctccttattcttcagggacaaatacaccgccgattacccagccagcgcgaattagtttaccagttgggaactgagcacgcaaggtctttttgaaacgactttgaatttgcacagttagccacttaccccggtagttctcaaaattagtgatctgatccttgcgttcgtcaaagtcaccgtacgtcacttcaagcagctcttgaggtacagggtcaaacaccaccagaacagcgttcccattcttgtctaccacgtagttcacgatctgcatttccatatcgaagaactctttgtacttctggagaccgctggagcgcttaccagattcgtacaagccctctgggctgcgccacatgataccctcataaccgttctgacggtacacgtcgtgaagacgtttgaggtcttcgaaagtggagcagaatacgtactcaacgaatcgaatactccccagatcactgtgtagtgcagactggaactggaagtctaccagacgctccttgaatgtcaagccttctttcacgatatcgaatacgtgaaattccagtcgctgccgcagtccgtaaataaacgatgtgctatctacttccttaaggagccgatcatactcctcctctccgtcttcaataggataggcgtccagagctttctcggccttcatccacttgtcgtaagcatcctcccgcttaaccgcagagttgatatcttccagcacctccccatggacgtacagttcgccgtcccacacatcaccctcttgcatgatctcttcgagttctttgatgatgtgcggtacattgtaaggtttacccatgcgagacgctagcgtaactacgccattggctttcttagccatgcaacgcaggccgtctagtttaggagagccatacccctctttgtatttagcgggatcaagcggttttgcgagcatagccataacagggagatcgttgagttcttccttggttgcacgataacccttgtccaactgcttgctcaccttggactgagcctcagacacggcctgctcctctacagagcgtttctgcttaccaactcggatgttggtaacctgagaggtcatggctccatgttctttgccgtatttcacgacgatattgaagctaccgtcttcctctccgaccacctctacagtccactccttgaacccgcctttcttgtcgagtccatacagtcgttgaaaataactcattgatcctcctcgtatttgatgacaagaacatcattctcccgtaggtgcctaagaccttcgtcgagccgatattcgtgcttatagtacactactttgatcccagcttcaaccaccgagatagcacaatttttacagcaagagtgagtgacgaacagggtagccccttgggcactctcagggctgcgtataagggccctcagtgcgttttcttcggcatgcctcacctctgccttggttactcccgtttcgtcctccagcggcccgtttaagtgctctggaagggcattatacccgcaactgatgatacggttacgttttactagaactgcaccaaccttggaacgagtcgagtcgctgcacttagcgaaggcctcagcggcctccatgtaagctttaatatgcttaaccttcacacctagcctccgccgacgaggacagcaatctcctcgtactcttcagtggatgcgaactccatgtaatagtcgtccgtatctgacaggtaaacaacgataggcggataataactccatacagggtctccgtgttcgatttcagctaccctcacattgccatacactgtgcgaagagtctgtagagcttcgatcacatcgtcaatacgcattacagttggttcagtcatacctgcctcctcagttttctactttacaaacggcatcgccgcgtcgaaggaacacttgcactgacggctttccgctccacttgtcccacgcttcagctttaacactgacagtcttaggattgatggcaaccacctcgcctaccagcataaccattccagttccgcctaggcagaatgctactgcgtcgccgatctcgatatcccttcctgctacgtccttcatttgtactctccatctacacccttgattaaaataacgaagtccgaggggtcatcactgccgtaggcctttgcccgaaactcctgctcgtatttattcaccgcctccggatcacttttaacctcaagctcttggtagaggtcttccataaaccaacccaagtccgtggtcgcagccgaagccgagaggtgaccaagaagtcctaccagcatattgatctcgtcgctctccaactccaacttgtgaccgttacgttttactactttcatatttcctcctatcgcttctgtccgcgacgagtggctacgccgtaagctggcttgctcccctcgcccgtgttgtgtttcttctgcactcggctggcattgacggtgtaacgccctttgccatactcttcatctatccacgcttgggccttagctcgctgagacgtgtggacaaagatgtagtagccagatgcatccttgataaaccaagtggccgggggctggaagtccagacgtgaaaactcttcatagtcgatcacagtcaccttctgcttagccactgtatactgccccactaccgactcttttgcaatgattttatcaatcatctgagttgaaagatcagagttcttcgaggtcaatttctacctcctttcctagtccagtatctgcaaagaagctatcgagactcagagcgtggtattgagacactttgtaaccaccactcttcagaaggctgtgagcggcctcctctactttgtcctctgtcagtctccagtccgcacctaggagtacttcagctaactgctctacactcggagggttcccaatccacagacccattctactgtcaggctcgtaatcttcttcccatacaagttcccacactaggttactcattggtacacctccttcttacgaatagaatacataacccactcgtcttttcctgtcttcccgcacggaatgtctacttcacactctgcgtttacaatcaggcccgctacgatgaaatcaagaagctcctcgtctggctctggtaagcccgggtaggacgatacaaccctgcggatagtctccgatttggtattgcccagtaccccaagcatgtggaggtcaaactctccactgtagtcgtcccagagttgtccaaatatcacccatacactattcatacctagtaatcctcctttagcttgttggtgtccattaggcagcctccttcttcttgtccagcaacttcaggcatcgtttgcaggtgatatgattgcggtagcgggagaagttcttctcctcgaagtcgccatcggtgccacagaagacgtcatatggttcttcactgtccgcttctgtgccgccgtcccactcgtcgtagtgaactgctcgcgtcgccattcacttcacctcgattccggcttgctggagggcttcgacgcactcatctcgataagcttgaaggtcttcgtcgaatatgactctcggcaggtccaccctcagagccgcgcggctggctttccatgcctgccacatcagcgagtagcggtgtgctgcttctataagagccacgtatacgtggacgttatcggtcttcacaggaaagtagtcggtgttacgccactcgacaccgccgggaatcgggaaacagttttcgaactcctctctcatactccgcaatcctcctgaatttctttaagaagctcagagggcataaccgacagagccagttcctccagagcatggatgtaatcctcgacatatttccattcctttctgatcttctgaaggtacacgccttctttgctgttgtcgatagcctgaccttccagctcctgcatcagttcgaacattttgtatatcctcctatggccgcaaaaatggccggcgactactgtcccggcctgatgatactactctgaaatttcttccattgcaagtcgtttcttttcaaagaaatcgctgagcttgtcttctagctcttcgccaccgatgtaaagctcttcccctgcctttacacgctctagctccttctcagtcaagaagtcactgtagacgtgatctacccatttatcgcaccacgctgagctaaacgctgcattcctcaggctattcctgaaatcagcagatacaacgccaaaagaaggcgcgtggatcatgaaatatgtgaactggtcgatctcaacggagtcgcaggctagcgcgatggcagtcatggcagacgcacactcaccttcgagacgagcatgcactggagcttgacactccttgatcgctcggattatagcgttggcggtctctacctgtccaccgcatccgttaatggtgatgtacacttcatcattctgacctgcattttcaagggtccaaagctcctctgtgagttcttcgaggctctttattacgtatggcagaaggatggagtaacgattgctaacactttgtgtacatgaaacaggcataatacctcctttacaaaaatgggcccgaaagggcccttattactgaatcactcctcgctttctttctggccagagcccagcattgcaaagaatggaaggaggattgtgctcagctctccgctgacagcttcaccaacttctgcaccagcctgagctacactcaggaactcttcagtgcgtacaaacttgtcaaccttaacgagggttttaaagtctactcgttccaagaacgcagcgccggctgcttccgccagaggttcgaggtttacgacttccatagcgcgatccagagcttcctgattgatctctaggccgttctgtgcggcaacctgcatcagggtagacttcacagtctggattgcgtagtctttgaaaaactcacgttgtgctttgttaaacttcattcacttttctcctttgtagtacgacgacggcgggtttttggtttatcttccgattcagtctcttggacttcctctacaggaacttccttagctacttctgtagccttttcctcagtctgcttctctgcaccttctcggaccatcttgacagacttgagagcgaaattcatgttagcgaagtgcgggtcttccacatcaattcggaagccttggtcaaaggcgttctgcatgcccatcagaagactgaaaacgtcccattcttgcacaatgacttcattgccgtcaagctctttttcgatttcctcagaaacgccttcctgacggaacatctggacttgacagagggtgccatacacaggatagccttcgatggagcggacgactcggaaaccttccttcatgtgggcgtgaatcgagcgaagccagacgatagggttgtattctacgatattgataacttgcatattctttttactccttgcgggttagtgttttacaataataccacgtttctcaggaatgtcaacccattttgttctggtagaggcttgacatagaggaaatctgtggtattatcaatattcagcgtgggagagatatgtctgaaagcactcaccggcccacgcctagcgcctatgaagaggaatccacaagggcaacctgaactcgaatgctgttaaagggtggagacgacgcgaaagcggaatgacagcaatccgatgcagcctacatgctgcccctcaccgaactcatctgcatgagtaagaggaattggatagagccaaggcacgtcttaggcagattaaattctgtatggcgagccttgggacgactctatccttccctagccgaatctatctgcatggggtgttctcctgatacacatacacaaatacccaccacagataatccatcaatcaacccataaggaatttctatgagatgtaagtgctgtgatagcgaactctcgtttgagactccagtcatcaataaacatactggtaaggaggacgatctctgctcctcttgccgtaggtttgctctcaatcctacactggatcatgagtattttggtggttggtatccaagcgaaggggttaccgctcctctccctaccggggactgacattgtatatagagtgcgcgtactctgacaatatgtataaatagtagattacggtgcgaataattctttaagggcttgacaacaggagatttcgtgctataatcggagtatatggggcttacaaagcttcagaggatttaatatgactcaagaaagaaacaagggcggtcgccctacgaatgccgagctagaagcccggggtatcattcagacagacctgaaagcagggcttagacttctaaagaagagctttgcagagaacatcagattcctccaagagcaatctgacaacccagaggtctctctacagatgagaatcaagctcaagaaagagctttctgacatgttcgtcgcttactacaaagctgacattgcactcaaaaaagagcttgcaaaaggaacagaatcaggagataatgagaactctgaagaggacaagactcccggagtcgttctcgcgttttgattaattgccgcttcgttcaatggtaggacgccagactttgaatctggagatgatggttcgatcccatcagcggctgccaaatgtagtaaaagaacattcacccgacaaggaatgtgtctcgctcagaggacagcgagtaataagtgtcctccagaattaagggtcggtgagcgtaattggcaacctactggattccaaatcctcgtattctctgttcgaatcggagtcggcccgccaaattagtgttgacaggagcaaagacctcttgtatagttacaccaactgctcgtatagtgtaatggacagcacaacggtcttctaagccgtaaggtctaggttcgaatcctagtatgagcgccaaattagatggacggaagctaaaggtgccacctgggtccttttctaccgttcgtatagcatacattatacgaacggtagtcctaagaaaccaccactgctcactgccaaaataagtgattttaagtgttgacaaactgaatttttcatgttttaatacacttatcagatgaagaaacaattagcgagtagccctgagtaggtcgggaactagtctagaaaactaggccactgcgatgagcggtgagggttcaactcctttactcgctgccaaattaaggccctgtggtggaattggtatacacatcagtcttagaaactgacgccgagaggattgagggttcaagtccctccggggccaccaaattaagaatctcttttgctatttggttagggttcgagtccctacccggcgactatggccggtctatggcggccaaatagtgagagagctaggggacatgacgaaggtagcgctgctttccgatctccccggcgctataaaagttatcatgaaggggttgacaaacaagaaattcatgataatataggtacatagagtaacaaacaatgtagccgggtagctcaattggtagagcacccgaccgataatcgggtggttgaaggttcaagtccttctctggctaccagaatttaaaggcccattagctcagtctggactagagcaagcccctgtctagggcaaggtcgtcggttcgaatccgacatgggtcgccaacaaggtcgttgtagagatagatggctactatcatccggctgtaacccggacgccataggctagaggttcaattccttccttcgaccaccaaatagcgagagcgttaagactggctggcgctgtcactcggctcataaccgaacacaagtggttcgattccacctctcgctaccaaattgcactccgaggaaccctaagtggtgggttcagtgtcgctacctatctcggtaaggggaagcgcctaagctggcacgggtaattgagtagctgtgataagctactggcagccagtataaatcgtccggctcgggcccgttatagctcctagatttgaattagatgctgtaagccataggaggtgatccagtatctcccggaggggcccgggttaacaacctcatgaatttagcccgcgttggccgagaggtttaggcggcggattgcaaatccgtctcacatcggttcaaatccgatacgcggctccaaagtttattgggatgtagctcagtggtagagcagggagctgttaactctcaggtcgcaggttcgagccctgccgtcccagccaatttccaaaagagactcttcgctttagaagcagagtcgaacgcccgatacgggccttattatctcctcgtagctcagtctggttagagtgtcggatttggaatccgaaggtcgaaggttcaaatccttccggggtgaccaatttaaagcgggtttcgtatagtctggttattattcttggcttccacccaagagactagggttcgaatccctaagcccgcaccaaaagtcgtagacctcagtaacccggagtaacgcccgggagaagatgtgagttctacgtatacgcgtctgaagctaactaggtagaagcaccgggttgaaattccggaggacttggatcgttaccaagcgggcgcaccaaacaatgcagttatagattaaatggataaatcgccagactttcaatctggtgttccgggttcgatccccggtaactgctccaatcaagtccaagccggaacattcctccgtatgtgctttcagccggcttggcattatcagtgtggagattgtgcagcccggatgctgccttccggttgtgacccggttgttggggttcgagtccccgcctccaaccaatgttgtggaattgaatcacaggacgacgactgggtgagattgagcgtcctctagcccgaaagggtgttcgcgcaaggcgaaccgaagccgaaaggctgaagtggtgcccggacccacaaccaatgttgtgtaatggaactattacgttgacgctgtgtgctctccggatcgtaagccggtaaagcgggaatagcgggctcccgtagcagagtagtagtgtggttcgattccacagcacgacacctttcctcctcgcctgtgctgaacggtttcctcctcctttcccgtctcacaggctctattccctgccctttaagcatttatggtgatgcaccggctttgtaacccggcgaattctgttcaagtcaggaatggggcaccaattcactatcaaagaacccgcaagctcccgatagggttcacactctataaggttgtagcatggaaaacactaaggttcctgataaaaaactcggaccaatcgcgctagcgcttaaagaggccagagagaatttcgatctcagccctcatgttattggtccaaaatctttcaaacagaaggagttcacagacagcgatgcaaagatcactgtattcggtggtgctgctggtgctggtaagtcttatctcggtgtaatggacttcatgaaatatatccatgatcctaacttccgaggtgtaatgactcgtcgtactactcctcagattaaaggcccgggcggtctgcttgaaaaagcaacagacctattcaagctcgttgaccctaaagtcaagtggaaagacaaagacggcaagtttgtgttctcttctggtgcagttattttccttcgacacttcgaacaagaatctgacaaagactccttccaaggttgggaggttagtaagttcctagtcgacgaaggtcagcagttcacagaaggcatggtgacataccttatctctcgtatgcgtaacccgaaatgctcggttgttccgcacatgaagattacatgtaaccctgattacaattcgttccttcgtaaatggattgaatggtggctagaccctgacacaggaatcccgatccctgagcgctccggcgtaactcgctggtttgtacgcaaaggcggtaagatgttctggggagacaccaaggaagagtgcattgcccttcatggtaatcccagtctagcgcctgacgatgaagatcaggtgaagcctatcagcttcaaattcatcgcggctaactgtttcgataacccaatcttgatgctcaacgaccctgagtatgtagctaaccttgaagcccttcctagggtagaacgtgaaaagctcctagacggtagctggcacgctagagaagagggagctggatacttcacaagggactggtgccaaatcgttccccatccgcctctacgggtgcttaaaagggtacgtgcatgggacatcagcggtagcattgaatccgaaaccaacagaaaccccgactggacagccggcgtgctgatgagccgtacaaaagaaggcttgttcactgtcgaggatgttgtcagagagcgtaggttgttcggaggtgttttcgacctcattctagaaacagccaagcaagacggtcaagacgttgaaattcaaatcccatgtgacccgggggctgctggtaaagcttatgctgcacagctaattagagacctagcggatcatggattccacgccagaccgaagacaactaacaaatcgaaagttactcgattcgccccgttcgtatctgtagctgaaactaaatcagtgcaagtcgttgcgggagattggaacgaagattacttcgatgaacttgagcgattcgacggaagtaaggctatcaaagatgaccaagttgacgctacatcagatgcatttaatgctctatcccttggcagcttgattatccctgatttcctaccgcctgatatgactcaatccaacaaattcaaactaattaacggctaaggatttaaggtaaggaggtttatttatgcaggataaaaagtctaaaagtaagactgccaagattgattggtctcactggacagtgacggtccctgaggagaacccggacaagccaggtaagccgtattcactgggttatccggagattctcaattatgcagaggacaaaatcgcgtcaaaatacatgtacgacgatccaaaggacaaaagtgtcgtgttctacgcattcccgtccggcgtgactaccgctaacacccattacagccggtcagagttacgggaaactatggagaccgggtcaaacaaagttaactggaccttcgctaagggtggcaaaatgcgtggtacttacgctatcgacgacatcagcaaagagccggatggtaagtattcccgcgtaattatcgcccaaatccacggcgtactgaccgacgagcaacgtgatcttattgggcaaaaggacaataatgcccctccgattctcaaggtgtactgggataaaggtaaaattcgggtaaaaacgaaagttttaaaggacctgaacgccccttacaaagagatgcttctggaacacgcttggggtgatgacgaaggccggaactttaaagagaagattgacttaaatacacggttcacattggaggttaaagtgagcgatgggcggatggaagtcattcttaacgacaccgaaagtttggtctatgacgacattcacatgaaaaaatggggcattttcgaaaactactttaaagcagggaactacttccagtctaaaactccgggcacttttgcaaaagttaaaatttattcacttcaggttacccactaataggaggcggcgatggccgagactgaaaagacagcaccgggtatcccgcgacttcgcctaggcgagattggtagtacaggccttaaacaagtcaatggtactattctggaagaacgccgaccagaacttcggttccctagggcatgcagaacattccaaatgatggcggaagaccctaccatcaaatcagcactcgatctcttcgaaatgatgatgagcagggttgactgggaagttgatctaggagttgaccccgacgaggctatgaaggcccggggtaaattcctgaaagagtgcatgcatgacatggaacacagttggtactccttcatcaaagaggtcactagcttctacacctacggattctccgtacatgaaatggtgtttaagcgacgtgaaggataccctgtatcgaagtacaatgacaacaaattcggtattaaaaagttgccaatccgctctcagtctactatcaccaaatggttgtactctgaagacggtagaaacttcctagggtgtgagcaaagtcttgccaatgttgtcaatggcgaccgttacgtcaacctaggtaataaggacggaactgtagagattccagctaagaagatgcttcttttccgggtcgatgctaaacgtgacagtcctgaaggtaacagccctctccgtgcgtgctataacgcttggagatatcgagtagagattgaagagcaagagtccgttggcgtaacacgcgatatgaacggtatgcctacgctctatctgcctcctcgatatatgtccgaagatgctacagaagctgagagggcagtctacgaatactacaagcgagtaattcgtaacattcaaatgaatgaacaatctggacttatccttcctcaagcgtttgacccagaaagccgacaacctctgttcaaattcgaactgacctcttcgcagggcagtaagatgtatgatacagatgccatcattcgtcgctgggacaacaaaattctgcaagccttgtttgccgatatgctgaagatgggtcaggaccaagttggctcttactctctagctggtgccaagactaacatcatggctatggcgattgaatcgcggctccgcgaaatcaaagacgtactagataataaactcattcctacgctgttcgcactgaacggtgattatagtccagacttgccgaagctgcaatacggcgagctagatgaaatcgatcttgaagagttctcgaaagggattcagagaatcggttctgtcggtggtcttgaacgtgaccgtgaggtttacaacaagattcgcaaagctctcaagattaagcctcgaccagacgacgagcctgttgatgtggataatatcatgggtggtcagtctcaagcaggtaaagctggagtaggtaatggtgcatcaacatccgcagccggtagagacaacgccgctgcaaataacgcataaggagacagaatgctgactcttgaaagtgttattgaagctctcagcaatgctttcggggctcccgccaaggcggaagaagccccggctgtagaggtcacaaagtccctagacaatgaaaagaggatggctttgtttgtcgttcttgagccccaagaaggcgactccacgactgacctacacgcagacacctactccgaagaggaagtagagaaagcttgcatcaacttcaatactcattgcaacgtagctaatatcttccacaagattgaaacacaggaagctgagattgtccagtccttcatcgctccatccgcattcacaactgacgacggaagagagatcaagaaaggtacatggctccagtggtggcacttccctgaaggctctgaagtagccgatgcactatgggaaggcgttaaatctggtgaattcacaggcgtctctatcggtgccagagctacagtcgaggatatcgaatgaccgtaaaagcaaaacgtaaactgaccgatatcaagtttgaacacgaaggtgctcatgtcgctctggtcagtaagctccaaggtggtgcagccaacgggcacactactctaatcacaaaagctaccaatggcgtaactgaagagcttatcgataaagctgctgaagttacagtcacaatgcagttccctgagttccttcgtaagttcttcgggatgtattatgaagatgccgaagttctctctgttgccatgggatatggcagaacggagtatccagaactagatcacaaagactggatcgaccagcgggtcgagtctatgtccattcttaagtcggtttataaatcggctgacctgaatcaagctctctccgagcttacccctgagcagaccctttcccttaaacaggatcaggaactgcttgaaaaggctctggaggtagtctccgagcaatccaatgaaaatccatccaaggagattaccaacatggaaactatcctgaaatcggcccacctagaagctctagctgacgctattgcagttgaaaaagctgctggtgtcgctgctgttgcagaagttcagaagcaactagacgccgctaatgtagagcttacagctcttcgtgaaattgtcaaggctgctgaggcagagaaaaccgctgctatcgctaaagcccgtaaagagcaactggctgaagtcctcccggctgaccaagtagaagatactttcaagtctctggaagttctggacgatcaagcttttgcacaaacagtaggaacgctccgcattcttaaagctgctgctgaccaaaatgacatgcttgtcgagaaaggtgtatcgggcgctggggaagaagacgactctgttgtcgccggtgttgccgctatcctgaaagctcgccacggctccaagtaatatctagccaatctagaggaattccaaatggctcaaaacattatcgcaaaagatcatcagcgtcttagcaactggctgaaagaagaacaaatgggccaccgtggcctgttctacactcgcgaaactctgcctgtcgctgacattgatgttaaaacaactggttctgtcctagacagcactggcaagctggtaactaaggctactatcgccgacgctacctacatcctaattaccgacctgcacgactatgccaacgctcagatgagccacgctgtcgtccttgctcgcggttttgccaagatcggctccaaggctgttatcttcggtgctgacgttgacgacgctgataaagctaccgtctttgaagctttcaaagccaagaacatcttcgccgttgaccagatcgaaggcgcattcgagaacgtcaccttcgcgtaagcgagggtcgttccagtaaataaacactaggagtaactttaaaatggctaacacccgttcctacctaaacgatggtcagttctacattgccgaccagactgaaaacctgcttatcatcccgaacacttggaccctcgtcgagaacatgggcgtcttcacaagtgaaggtgtgactcagaacactgtccagttcgaagagatcgaaactcgctacggtctggttaaggatgccatccgtggaactcgtcaccaagttgctagcgaccaacgtcgtcaactgcgtgccttcgcgattccgcacttcaaccaagacgactacatcactccagaagacattcaaggcaagcgcgctttcggtgctgaccgcgaagaaactctgaacgaggttcgtgctcgtaagctggaaaccatccgtcgcaactgggctaacaccgctgaagttgcttccgttagcgctatcgtaacaggtaagagctacgccccagccggaaccatcgagtacgactggtacgacctgatgggtaaaactcgtaaggttgtcggcttcgacctgaccaaccctaccgctgacgttatgggcaagaccgaagaaatcttcgtccatatgcaagacaacagccaagacggtctgatccgtggtgacttcgttgccctgtgctctcctgagttcttcactgccctgattaaccatccgagcatcaaagagttctacaaagcttaccaagctagtcctcaatactggcgtgaacgtctaaccgctcgcggtctggaccttcgcttccgtgagttctacttcggaaacattcacttcatcgaataccgtggcgttgacccgtacggcaaccgtctgatcccggctggcgatgcttacttcatcccaaccgacagcggtgacctgttcgctcgttacttcggcccgggcagcactttcgatgacctaggaactctgggtaaagaactgtacgctaccgagcgtatggctgaagaccgtcgttcgatcctgatcgaaaccgagtccaacttcatccacgttctacgtcgtccacagatgatcgttcgcggcactgtgaatgcgtaaagacttcagggaggcttcggcctccctttcgtcgtaggagggtaccaaaatggcttacactggtgatccagcaaacaaccctatcgaccgtctacgagagattgtaggggacgtgtgggagcctccgatgctttccgacgaaacctatcaatgggtgttggacaagaacgaaggcaacgaaagacgagccgcacttgaacttatgcgtatgatgctcttccgcctgacaaggggaatgagagaacgcacaggtgatatcgaagtatatggtgctgagtatttcaacaactacttgaaagctcttcagctcattctcaaagacccgaatattgcaatttctttggccgtgccatatgctggcggtatctccaaatcggatatgctggctaatgacctagaccccgacaacgtaacacgggaattctacatcggttttgcaagacgggagaagctttacaaccagtgcaaccccggtcctcaagaccttagcatggggtgtgattatcttggcaagcttcagttttaaaacagatcgccgtcgcctcacatccttgattaagagggtggaggctctagacggaacaacggtagaagttggtttcttccccgaggaccgatatggttctgaaaatggaaacctaccagttgcacaagttgcagcttacaacgaattcggtactactcgcaacccaacccggccattcatggctccaacctttgaagaattcacatctcaattccactacgcaagactaatgaagtccacgttcgagaacgtcctacgcgatggaaggcagacgaatactcttctgaagaaattgggtaaaatggttgcagagcagatgcaagttaacattgacgactatccgggctctaacagtccggcatgggcagcttacaaaggatttaacgatcctctattccatactggaaagatgcttgagtctgtcaagttccaaatccatcggaggcaataatgctctatcctaccttctccatgaccaacttcgtaaagctagatttgattagaagagggcagcccggagacgacggttttggaagacctacccctccagttgagacagtagtaacaatcacagctaacgttcaacctatcgaaaaatcgacagacactcgtatccttccagaggccgacagaagcaaggcttgcttcaaggtgtactccagaggcgaagagattcgacagttaaaggaaggcccgggagggtggagtgccgatagattcatgtgggaaggagagttgtatgaagttatgaaagtcatcaactattcgatgggaatcctaaaccattacaaagcaatttgtatgagagtagagaggaatagcacagcatgatccacacagagctagaaaactccctctatcttatggtcaaagagttgttccccgactggcgtgtaattcaagcttacacgaataatcaggaaccgcaaaccccttatctggctatcgacattaagaggctggatgaactgggaagggaaaatgtctccaatatgagcgatcccattagtccttcgcatggaactattcaagttcaacaggacttcgcagccaaagtcgtattcgaactgattggcaagtatggagagacagcaagtgtctctgacatggcaatggcgattactcgggcaatgcgtactccagcaggacacgccgcccaaagaaagtttaatctatcccttttcaaactccctagcacaagacgagttcctatgctaagagaaacagatatgtacatgttctatcaagttacatgtgaatttggattctctgttatagaaaccacaactcaagagtttgctgctggggctgatattcacggcgtttattacgacgctggtcgcccgggtcacattattgagtcccacatcgacataaacttcgaacactaataggagacaggaatgactgttcttactgatgtaattgacattcagatcagccgtgagactgctgctgtcgcacagacaaacttcaacgttcctctgttcatcgcttctcacacaaacttctcggaacgtgccagagtctacaacagcctgaaaggtgtcgctgaagacttcggagaatccgatccaacatatcttgccgctgttcgctacttcggtcaagctctcaagcctcgcagtctagttatcggacgcagacaagttccttctgctaccgtctctgtcagtgttgttcaggaaggacaaagctacgtccttaccgttaacggactacctgtcagctatgttagccagcaagacgacactgctactctgattgccacaggcctaaaggcagcttatgacgtaactccggtagccggcgtaaccgtcacagacaacgaagacggaactctaaccgtcgcttctaacgaagactggagcctgaaggtttcttctaacctgactatggctgctgctccctctactgaaggttggccggctgctatcacagcagttcaaggagaaaacgacgaatggtatgctctgagcattgacagccacgccgatgatgatatcatggcagtagctactcatatcgagggcaccaagaaagtgtttatcggagccactgctcaggctaacaccaagacttccgcagagaatgacattgcttctcgtctggttgctgccgggttccaacgtacggctctaatttaccatccaaacgctgacgctcaattccctgagtgtgcttgggtaggataccaactgcaagagcaaccgggtagcaacacatggacccataaagctctagctgccgtagatgcttaccgtctaaccccaaccgaatctaccaacctgaagaacaagaacgttaccacgttcgagcgcgttggtggtgtcaaccgtacattcggtggcgctatggccggtggtgaatggatcgacgtaatgattttcgtggactggctggaagcccgcatgaccgagcgtctgtggttccgtatggctaactccaagaaaatcccttacgacgccgttggtgcaacaattctggaatcggaaatcagagcccagcttaacgaaggaattcgtgttggtggtctggctgaagctccggctcctaaagtcttcgtacctgatgttctatccatgtctccgaacatgagagcacagcgtatctttgaaggcattgaatttgaagcccgtctggccggtgccattcacttcgttcacattcgtggaactgtgaccgtctaaggacggtccttcccataaggagattactaaatggctgttcaacgtctagcgacattctctccggctgatgttaccattgttattactcaccctgcaactggtgagagcatggttctcggcggattcagcgaagacagtatcgttaacattgaaagaaacgctgacacttacgtgatgtataccggagccgacaacacatcgactcgcgtctacaacgcctctaagtctgctaccctcactgttagccttcaacaaacttcgccttcgaacgacttcctgactgctctttacaactacgacgacgcccgtcgttcgtctgagggattgttcacaatccacgttaaagacaactctggtcgttccgactacttcagtgatgacgcctatgtcggtgttgttccgggttctaacttctcgaacagcatgcagacacgcgattgggttattcatgcacacaacctgcaaactctaatcggcggtaacgccaagctgagcccgggtgatgcggatactcttcgtaacctaggtgtcacactagaccagcgctggctgtaatatagcgcttatgccacatcgacggggagctgccttaacgggtggctccctttgttgtttctggaggatagaaattgattaccacctactcgccgcgtgacgtggttgtaactctcgctggtatccattccgtgacagggtacgcagagggagagtttatcagaattgtaaaagatattaagcctttcatcaagcacggttcgatggatggtgaaatcgcaagggtctacaacaaagaccaaggctggcgagtagagttgacaatcatgcagtcctcgccgaccaatgatatcctttcgatgctttacaacgtggacattgcaacccgaatgggaaaattcccactgatgattaaggacacgaagggttctacaagcttcctagctctgacagcatgggtggaagacctacctagggtatctttctctggacaactggagacccgcacttggattctagggtgctctgaggtcgccatgaacattggcggaaacgtcgatcaaagtttggtcgagcaagctatcctgctgggaagctctcttctgccagcccttacgcaattcggaggcttctaatggctaacacggtattgacatatagcccatctgatgttaaaattgtcctttgtgggtatgctctcactggtgtagtttctttcgaaatgtcttggctttcgagaccctacacaatggttcgaggaatcagagggcaccacacccgggtcttcaatagagacctttctgcgcagattagaatcgaggttcttcagacttcggtgtctaatgatgcattcttctcgctagtagagcaagaccgaagaacacaatccgcccgaatcaccttgtctgtcaaggatacccacggtagcaccatgatgagcacagacaacgcttatgtcaatggctaccctagcataacattcaccgatggaatcgagaacagggtctggactattgatgttctggactggaccgatggcacggtaggcggaaaccagcaagtcggcttcgacgtgtttggaactgttcaaggcgctcttagctacctcagataaataaggagtatttatgttcggaaaccaacgtactgtcatccacaatgggacagaatacactatcaaccttctgccagcaactcgcggtatcagcgtactgaagcagctaaccagcttgctgggtccatcccttgccaagtatcaagctgaccacgacttctctggagccatgaaagaactgttcgataacatcgacaaggttcctgttgagaatttgatccagaatctgatgctgacagttttcaaaggttcgatggcaatcaatttcgacaccgaattcgctggcaagtatgacctgctgtacgcactcacaaaagacgtgatcgagttcaacttcggctcggttttttctctaatcggtttcgcagaggcaccgacggtataaagaccggggatgggcagtccgagacttcagtcactactgatcgagttcagagtgatcggagggttagggaggcccaccagaagttctcgcagcattgggagatttatgtggctatcactcaccctctcaagctaacgacgtatggggaactgagtacagtcctcactacagaagatttgtacaacatccttgaggttatagacgttcacgatactatcactcaagtggcaaaagaacacgcagaggctgataagaaatgattacagaaaggattgcccagctaactggggaacttaaatttacagtcgattcccggcctctcactgcttttgacaagaagctcgctggggtcgaagcccggctaagagaattctccaagctgacgaacaagcggtttggagttaagctaactctagatacaaaaactctgagagaggagcttgccaaggcagccactcaaagggtagtcttgaagaacatcgcggtagatgctgccgctgttcgtcttatctctgagaagcttcaagaaagactgaatgcaacgccgatcaggttgaagtctgttaggctagaccttagcggtatccgagatcagaaaaacttcgtaaagacggctctcggccagaccaaggtcgatctaccggttgaactgggcttggctcaggctagccgtacgctgtatgaatggaagaagcgcacagagagtcgttttaaaattcatctgaatgcagacattagccgctctaaattgctccagaatgcacgaaacacactaagggatgtgcagggtaggctaaacggtcttgctgtcgctacgcctcaaattaggctgtctgtagaccgtgcccatcttcgtagagagattcaagatgttcttgagcaaatcagacgcgaagtgagaatccgcattgacctagagtcttccatccgaggaggtggtgcaggtggatcgagaggtactgccggccatatccgtcaaggtatgggaatggggattggtagcgagctagccgggtggggacgcgggtttattcccggccttggtggtgcgttcgctattatgcagcttaaccgtgctaaccaagaactgcaaggtcaacgtctggccatgcaagctgtcggtggtggagtacagggtggtcaagagctacaagccaccctccgcgatatctctcagcgtctcggtcttgacgatagagcaataggtagctcctatgttaagatgatggctgccggacaagcatccaacttcgacaaaacacaggttgatggcatcttccaatccatggctgaatatggacgagtgatgggtctggacggggaggctatgaaaggctccttccgtgccgtagagcagatgatgggtaaaggacagatcatgtccgaagaattgaaaggtcagttggccgaaagattccccgctgctgtagctctgatggctaagtctcaagacatgactatcgcagagctaatgaaaaccatggagaaaggggagcttaagagtgatgctctgatcccattcgccagaactctagcggaagaagctcgtaaaggtggcgctctggacgcggctatgcaaggtacagccgctcagcagggccgattccagttcggatggaaccgcactatcgaggccttcgcggctggaggattcgaccgaggaatgagcgacttcttcaagattgctgcccaaggcatgaaagaagcgcttcctctggtaactgcacttggtggcgggttcgaagctcttatgaggcctgtcaacgctctggtcggtattggaggggagcttggttcccagtgggagaacattgccaagcagttcaacatgaccggcacagggctgactcttaccacggctcaaaccctagccttgctgacccctatgggcaggttgatctctgctattagctggggtgcgttggcactggaagacttcattgtcttcttggaaggcggtgattcggtgttcggggacttcttgaacaacaacgtacaagctgccgagacattcgaaaagctagccagtgaatccagtgaactgaagaacaatctcgacggtatcttctctgttgtcccggggctagctgaagcgctcaaaggtctagagttcaatgaaatgctggtcagcacgatgagagaacttgctgccatcatggagttcttcaacagtgttgtagagagattcgcaatagccggcaagtacagggacgctaagattgctgaagccggaggagacagaagtactataatgtcgaacatcgacacgatgtacgctatgttcaatccggaagatgcaaaagacaaggccaccttcatcggtgacaggctagtagctcagaacattgacgcgatccagacagagactcatacccgtgcaacccagtccttgactccagaccagtttgggtatatgatgcaacgtggtcaagttagaaacgaaatggagggtgccctcaagaagagtgccattgacattagtttcaacctcaatgtttctggtatcgatgctcagggtaacgtcatgacaactgaagcgcaagagcgagtacgagagatcgttagtaacgttcttgaggaagaaatctccagagcttcggcaagttataaggaatcccaatgacaattgctatcaaaagagagaacggagacctaatctggttcgacgctgttacagagttcggaagacagtaccgtggctctgtgagttccaacccaatcgaaacgggaggaaaaatcacagaccacattactacagaaaacccagtcttcactcttacagccgtcgtatcagacgcagacttcaacttgaacaggcccgttatcaacgacaacgaggcccagacatacaagatcaacaacaaagagttcgtgaatacgcagccggtaaccatcccggctgttatctcaacctctagactagaccctagcagaatctttccagaagttatcactcagtttattcctcctgagattccttctgcaactgtcctccctcaaaagggtgataaagtcgcttatgatattgagcgccaactgatcgacatgcagcgtaatgctgaggtcttcagtttgctggacttccgagacggtatcatctgggatcaaatcgaaagatgcatcttcaccgacttgtctttcactgaaaacgccgagacaggtagcagccttcaacctcgtatgacaatcgaggctgtgacattcacagatactcgttatgtcgaggtgagggttaacaagggtagaaagaccgctaagaaagaaaagagagacaccaaagaaggtgataccggggctagcaatgctaccagccaagactctcctacattcaagcgtagtcaaatgaaagaggctcagattagaactcaggttgcgaggtagactaaatgagcacgacttatatcgacacacttcctctctaccaagaccggaagtacagatacgcagtagctatcgagggaatctcaagagtccttcaattctactggaatagccgctctcggcagtggcacatggatatattcgacgaggaacttaaccctatcctgacaggactggcggttgttcctcagtatccgatcatggcagactacgccatgcaacatataggtttcaatggctacttcctactgatgcctgtcaacctagaacaggtacagtataagcacgatgcaagtgacattgtaccacagtttttcgaactgctatacgtgaacgttgacttggaggatgacgtagagtgaaacaatatgacagagtgtataaactaacgctcggtaacactgaatccgggcaaggtgtagagattacaaacctccaccctgacggaagtttgaacagagagggacttcagttccggtttgatatctctaaaagttcagataacaagaagagcggaaactcggcgactgttgagatatacaatctgtctattgccactctgaacattcttgaaactgagtatctgacgtgccgactagaagttggttataaggaaatgggaacttctgttgtgcttgatggcaacgtggttgaaacttcgactagaaagagtggtaacgattatgtcactcagcttattctaggtgaaggatatacagcactaacagagaccaagctgaagggcacagtatctccgggcaaaactgtaaaggatgttatcgaagaaattcgtcttcaaatgccgggagtggacagaggagcttatacaggcctcaattgcaacaacccgatcatgtatggataccaactacgtggactggctaaagacgcactaaacagtgtgtgtgaagccaacaatattgaatggaacatcagtggaaacgttctaaacgtcacagacgttaacggcccaacaacgaagagtgttcaaatggctcctctcgtaaacagagagaccggcctgattgatatcccattctacgccagtgccagcggaacagcacagaagaaagaccagcggagacggaggggcgttcaattcaaatgccttctcaaccctgagctaactcccggggttcttgtccgggtagagtcggacagattgtcaggcactttcagaatcaacaacgtccgaatctcgggcggatacagagacaacgaatggtacactgaatgctggtgttccgatcttaaccaagaggatattgaccaatgaggagaacaggcctacaagagcttctgaacctgcactcgtccacagagggttcgaagcagtacactgccataccttgtgtggtattgcgcgttctggacgattttagacgcctatctgtcgatgttagaccagtggtcaacgacctgtacaaagacggcacatcggaagagcaaccagagattctatctgtccctgtcattatgccgggaacagctaacacacttatcagcttcccattgaatgttggggatacggtgttgtgtgtattctctcaaagaactatggacgtgtttaaaggctctgccactggacagccacacactccaaacgatcttcgtaagttcaacatggcggatgccattgccattcccgggctgttcaccttccctaggtcgatgaacgaccctgcaagacatagttggccacatgataccaaagaccttactattgcccacaacctgatgacgggacaagaggcggaagttaggatcaaagccaatggagatattctaatcaacagccgcaagactataagcattaatgctcaaaatgtcaacgtcaagtgtgcttcactcactgtcgatgcagcccatacaacatggaacgggaacattgcacatacaggtaactacgtgcagactggtggaacttctacattcaacggtattccattccacactcacaaacacggtggtgttatgccgggcggcggtgttactgctgtcccacaagcttaaaggagatcatatggacttgtttgtcaaccccgacacacatgacttggtttttataaatggtgaagctccagtcactcaacgaatggttgatattgttgctcagcgactaaagatcaaactgtacacattcctaggtgagtggttcttggatgataggatcggcatcccctacttcgagaggattcttggtaagtctaggagccttcccgctgttgacgcgatattccaatctgagattatgagagaccccggcgtccttgagattacatcttggcagtcggggatcgaccctcacacacgtgaatactccatggagttcacagtcagaaccacagacaatacagaatcccttcccatcactttcagaatgataggagtttaatatggctggaattacagcagaaggtctaacgattaaagacttggaccaaatcctgacagactacagaaacgtagcctctcaggtcttcgccgacctagtttcaactggagacgaagttgacacgtctggtaactctgctctaggccgtctgatcggcgtagttgctccatcggacgaagctatctgggaagttatccagatggtgtataactccttcaacccggcagccgcaactggcgtggctctggataacctagtatccttctcggcaattagccggcatgctgcacgtccgacccgggctcaggttgttctagagggcaacatcaacaccgttattaactcgcctcccgcgaagatgatttccagcagtacaggccgagtgttccacctactacaaggcgtgatcctcactcctaaagcttgctctggtgttggaatcttccctcagacagtaggcaacgacctgacgtacgagcttaagatgtacgttgatgacattaacacaacgtctatcaagtacacaagtcctgccactggcacagtaacatccgagtccatcctagcaggactggccgccgacgtagctacaaatcacggaaataccttgacaagctacgaacagaatggtatacttttcatagtacctattgacccatttaacaccaagactttcgaagaagcctccaacctgagtattcagaaggttagaaagcttggtatcgctgttgacgacgttattggccctgtgcctcagcaagctctagctatcgatacgatctccattcctattgccggatgggacagcgttatcaaccctgttccagctatcactggccgtctgcgtgagaccgacgatgagcttcgcgagagattccgaaactctaaattcgtacaagccaccaacattctggagtccctaatcgacgggctgatgaacgtagaaggagtcgaggatgttaggattatcgaaaacgatacagacaacccagacccagttcatggagtcccgggtcactcgttccttccaatcgttcttggcggtattcctacagaggttgcacagtctatttggctgaacaagccattcgggattggctctgttggagatacagaggttcaggtggtagacagtcggggatatacccatagagtcaactaccagcgccctgtcgaggttccaatcgagatcaagatcagtgtaacaaacacaggatcgatgccagagaacattgaagatatcctacggccaaggattgtagcgtacgggaccgagaattacaagatcggagacgatgtaatttattctcgattctatgctccaatcatggaaatcccgggcttccaagttaacagcctgacgattgccaagaaaggacaaactcaaggcatggcgaacattgaaatcgggttcaaagaagtggctacattcgccgcagcagatatcaccgtaactacggtgtaatgatagaaggagaattccatggctgtcaaccaatttgacagagaagattatctggaggtggcccgggaacgggtcactgaacagtttaaagagaagccgatctttgatcgcttcctgcaagtgctattgtctggcaagtttgatatccagaatgcactggaagacctccagactctccggtctctggacacagccaccgggaagcaactggacattatcggagacattgtagggcgaccacgcggtctagtgtaccaagatattttcaactattttggattcgctggaacggagcgtgcaggttctttcggaagcctgtcggaccctacggtcggtgctccatggtactcggtcggtgctccaactggtaacgccagagagccgagcgacgaagagtatcggatgatcctgaaagcaaagatcatcaagaacagaacaaactcaaccccagagcaagttatcgaagcttataaatttgtattcggggttcctgaagtattcctagaggagtacgctcccgctgctgtccgtatcggcatcggtaagattctaacgaacgtagagcgtagtcttctattcgacctaggtggtgcaggtgcattgcttcctaagactatcggggttaactacacatacactgagttccaagctggccgggtatttgctacagaaggcttccccggaggacaaggcgttggagacctaaacgatcccactgttggtggaattctgaccaacctagtgacataaggagttataaatggctgattacagtcaactacctattgaaaatatttggtccacaggcggggatatggtagccccgacccctgcgcagcagcaaggcggatggggtattcagtcggttcctcgccaatggtggaactggaagtggaaccttcacgatactaacctagcgtatttgctacagaagggcatcccagagtggactagtacacaagagtacattgctaacaaatcgttctgcactagaggtggatttgtttacaaggctgttcgtacgcatacaggaagcgaccctgcacaagttagtgccaactgggttcgagcttttgcagattacaccacatctagctctgcacttggaagcctgacaccaagagagggtggaatcccattcttcattagcgctacaggagctagcgtgtttgactctacggcctatggtcgcggaatgttgaatgtagctaatgcctccgcagctagaagctacatttcggctcaagaaagctctgttgtactgtccaacctgtccactgtgactagggctgccaacacggttccgtacttcaacacggatacctccatggctaccttcaacatcacagcgttcggaagaggacttgtcaacgcggctaatgatgaaaacgcaagaaatttcctaggactagctaactctgctatcattacggcagacccagctaacagggcacatactctggtctatagagatgctgctggcaacttcaacgctggcgtaatcactgctaccctgtctggaaacgcaactacagctaacaagcttagaaccccagttacaatcaacggtgtggcgtttgacggaagccaaaacattgttcttccgggcctagatacaagttatgcgggaacggttgcacgtcttcacatcaacggagcgaacctttcgagtgcagataagactactcagctagcactgaggaacaaatctgacaacgactggattagccttgctgtagtggatgacaacattctccagtttgtattcagaagcgctacaaacccagttgtacagattggcaacgaagttatccttcacacaggaaaccagttctctctgggcccgactcttacagacgctaggtctcgtctgggtctcgacagactaactcaaggtagctctgatactcaagtcttccccagcaccttgaacaatggcccctacttgaccgtacaacctacggctatcggaggattcaacggtagcactaacggatggctgttccgattcgacgctaatggtaacatgactcatggtacagttcctgccgctagaatcactggtctgtccaactcggctcagattccagccacaactacggcgcaggctaactctcttgttcagagagacgcagacggaggattcagcgctattgcgattaatgcgtatggcactatcgtcgggtacggctctaacatcttcagtagagcatcgggcactggcaacgcccacatcgggttccagagagcgaacggaacagaactcggtcttatctggggagcccaatctaacaactcgatgaacttccgagttgctggcggagccaccgcagtgtcgattaccggtctggacatgactgttactggaagagtcaatgctaccacactaaacgcctctggaaacgtgaatgcgacaggcaacgttaacgccgggagcgctacgctcaatacagcagggaatatcacaggagccgcttacggagcctatggttctctgaccaactgggttgattcggtatatgccaagaagggagaaattcctaacgatatcgcaagagccggagccgcttgggacgctgtaggtcagtatattctggcgggagatcaatctggagggtctggtggaccggggacaactagagctggaagccagttgaagccttattcgactattagctacacagcaggggcactaccagcagcaggcacttacagatgtatgggagcgtttgcaggtggtggtaaccagattaccctgtggcagagaatttcttaatagagggcttcggccctccttttagaggagattatagtggaattcagaaatgttgtaaaatacaaaatggggttcgaatgcgaggtaaatcatcctcagtggggatggattccgttctacgcttgtgattacgacgatagagccaaactggtatatgacgccatcgcccgtgctgtcgataacggagaaatccccgaaccaaaggacgttacagatagagacctcgttgtagatgcacgtctgtggagagataatgagctaacccgggctgatcgtcaagtagaaattgctatcgacgatgaagacgaagtaaaagagaaggcttggcgtaagtaccgctctgcactacgtaagtggcctgagcataaaaacttcccagccgagaagagtaaacccaaagctccgaaggagtgaggtaagataatatgccaaacattatgaagcctacgggaatcaacgctatctggtctgaaaatggccagaaggttgacccgggtgctgtgaaagtagggctaggctgggttacggaacttcctccgtaccagactgcaaacttcattgaatataaacaagacctgtttaacgctcacgtcaaccaacatggtatccctgaatgggatagcgtgacagagtatcagggtaacctgagctacactcaaggcgctaacgggatcatctataagtgccttagaacccattccgacaagattccaactgaccctctgaacattacagccggatattggcgagtggcgtttgaggatgcgggagaggcagctaaggttcaagccaaccttgatcggcatgtaacaaactacaacaccctctctgggattggcaacgtagttattgcaagacaaaacctaagtgtgtatagtaaagctgaaggcgacgcccggtacgctatgaagcacgggaacggctctaatgttttcagcgtcgccactgccacacagccaactcacgcgatcccgctgagccagctatcgactctcgttcctcctgcgaccgagactgtagccggggttatggcagttgctacgactatcgagacagaagctggagccaatgataccaaggctgtgagtccgctcaaggccgcacaggtgtatctgaagaagaaagacaacctttccggtctgtctaacgtcactgccgcaagagctaatctaggactgtcggatacagcgactatgccttcttctacattcctgaaggcaggtagcaatctggcagatgtgcctaacaaggcgctggcaagatcgaatcttggaattacaagtagtgctacccagccggaaacctatttcttgaggagcgctcagaacctagcagatgtacctaacaaggcacaagctagagtcaacctaggcctcactgggatggctacaacagaccctgcggcggttatgatgaaggcagacaaccttgctggattggctaacactgctaccgctcggtccaacctagggctaggcacagcttctactagaaatacaggagacttcctgtcgtctggggataacctgtccgacctcacgaatgtccaagcagctagaaacaacctagggttgaagggagcggctacgctcgatgtatggggtcttcctgcgaatacaactgccatggacttccagtctaatcagtcggatatttccagaggatgggctcgactaccaaacggccttctgctacaatggggaactggtcccggtctatctgatgacacaaggacgaatatccaactccctgttccagcacgaatcttgaacgttcaagtgaccgtaatggggacgtttaacaactccatcggcccgggcgctttcatgacggatatgtggagcaacaccgggtttagagttagctgcaactggggcaactggtcttacccgttcaactggtttgctatcacttccaccctgtaattcaggagtatcaaaaatggctctaactgagcaagacttccaatcggctgccgatgatctcggagtcgatgttgccagtgtaaaggccgtcactaaagtagagagtcgtgggagcggctttctactttctggcgtccctaagattctattcgaaaggcactggatgttcaagcttctcaaaaggaagctaggtcgtgaccctgaaataaacgacgtttgcaaccctaaagctggaggatacctcggcggacaagcggagcacgaacgtctagataaagcagtcaaaatggatagagactgcgcacttcaaagtgcctcttggggcctattccagattatgggattccattgggaggcactaggttatgcgagtgttcaggcatttgtcaatgcccagtacgctagcgagggatcgcaactaaacacttttgtgcgcttcatcaagaccaacccggcaattcacaaagctttaaagtctaaggactgggcagaattcgcaagaaggtataacgggccggattacaagaaaaacaactacgatgttaagctagcagaagcctatcaatccttcaagtaaatctaggaaggttcctaatgaagaagctattcaaaagctggaagttctgggctgctgtaggctctgcaacttttatggctctggaagccatggttcatctttgggagcctatccttcctcccggcgtgttcgccgcagtagccacactggtagctgttggtgtgagaatttcggcagtgtttgtaactgctggtaaagtggaggaagcgatttcggaaaccatggaacatgacaccatagaagatggctcaatagaaaatgatactaactaaactcaaaaactacgccctcgtagtagctgccgcaatggcagcagggtttggatatctgtcgttctctttgtacggcgacttagctgttgcgaagaatgatatccaatctcttcaagctgcgtctcgacagatggaagagcagttccagaaagagcgagcagggtgtgagatcaccactgggagactagaggcgcatatagtccaaatgaagagccgacaggagcttctacaaggccacctgtgcgagcttgagtctctacctaacccaaccccaagggagacccaagaaaatgccacagagacgatctctgagccttctactggggatagtctggaccctgctcttacaagcttgctcgacagggccttctgttccgcagtaccaaacgatccttattgtgcccccggcaagcctgaccgaggaggttaaggtataccgagtggagcaagatacagtcaaggggctcgctagagcttacattctaaatactaacagtgctgccatgtgcaatagtcaactacagacaataaagctatgggcagaagagcagagggctctatatggaaagtaaagacggcaaagaaggcctaatcaaggtagctacacagggagttatctctctgctaattgctatcctaatggcttggtctggattcctaagttccagtctttctaagcaggaagaacgtatctttgcgatgcaaagagatatggtatccgaggcaaaacttaacgcactagagtcgagattcaatagccgacttgaaagtgaaattagtaacgtaagaagagaacaacaagaaaccaaccggtatttgattttgattatgaatgccgtcaagggtcgggatacagaaactcaataactataacccgttaacccacactgggagacaatataatgacaaggaaacaagactggccgctagtttcagcagtcggggctttgtttatctccctccttgtctgtatggctattctggctttcacagcgatgactcccgaggctcggtttgactctgtacgccagacctacgagattcgaattagcgaatctgagcggcggtatgaactcaaactgaacagactacaggatcagataaactcggcctcgtacacacaggatcggcaatcccgtttgcaatatgaagaactcgactcgcttaaaaggaagattagcgaacttgagcggagaataaaagaaaaacaagaataattaagccccgggagcgaaagcttaccggggctctttgtcatgggttttcagcgaacaacttgataaacttcatcgaacaggtcatcaagcttctggataaccttcttagccagcttcttgcgaactttgttagcctctgggctggaatggagtagcttaatatcggacgcgttgccccagtccatcgccccgttgtcgaacagcactttaacattcagatgcatcgagccctcgtcaatatcgacaactacgccggtcatccgagcgttggtcttttcgaaggtcggcctcggaatgtctatgtccagactgccaaccataacaacctgccctttcttaacgtcaaataattccatttaaaacctccttaatctaacttcattagtgtgttgaactgatgcctcagagacttaaaagcctgtggcccatcgtcttccgctccttcatgaatatgatgagcgattaagtgtatcaatcctcggtctcctagtaacaaagaactaggaatttcttttatccaagccacaaagcaacagaagtgtagaacctccggcatggaagccttgaagctggaatcatccagcttcgataggcgttcatacgtagctttaagatcgggatagcttaactgatatgtagcatcttcgtcaatatgctggtcccctctaactacatactgcaagctcatattacaccttctttccgccttctgcaagacgtgcctctcgcttatggtcggaacgggtcatattgtactcgatcttctcgatgatcgcacctgcaacatctagacctcgaacattcgcgtagtccatgatacgaatgatagcgtcagccagttccacctcttccatcttccgctctggcaagtgatcgtccatcaaatccttacggactccttcagccgcttcggcgatttcagtggtaacgagcatcagcatgtgcagagcatcacgtttaatcggctcgcctgtgaccagatcggtgttccacttgcggttaacaacctcaaggccagtcatcattttgttaaaaccgctaacaaactcgaagacggactctcgttcgaatagttcaccgaacgttggctcttgatcttcgacaattgcagtgtggaaaggccactccatccaagcgtcatagcactttttgataagctcttgttcgtcaatgtatgagaagaaatcttcatatccatcaatcgcattaacaacttcagttcccctttcccaattgcgcttatcaataagtctctggtcgattcgcagggaagtgctgccaacttcttcccatgatctccagcctactatgccatcgccgaagtacaacagaatgggcagattgaatccgcgttcttcctgatccttagtctccatagctataacaaacgccggtactttttctccacttacgccattggccaagacgaaagaacccaagtgggtggtctctcggctagctgggcgatgagcttcctcgatatgatctttaactctactcattaacttcaccctcctcgcagaacatttcaaaataacaatcgacacaagttagcatgccgtcgtcgcttacaacctcctcgggagggaagttgttcccgcaacattcgcacacaactcgatcaacctccctgcatccccagtaagccatatttactcctccttcagaagatactcattgctaataactttgaagctgaagtctcggctcatgcttttgaaaaccaagccttcccggtacttaccgttcaacgcagactcgccactagccattttaattacgagttgcatgtcttttggaacgcctacgtcccacatgtacaccggcacatgtttgaccgtctcaccacccaactggttcagcgtattcagaatggcaagacgctccgctggaagacagtaacgactgtccgaaatgttgtagatatcgtacacatagtattccggtttgtcaactccctcgaagttgccttgaatatttggtgcaaccagttcgccttgaagggcaatattcagaccgaaataccggagacgttcaccaagattaagctcttctgccatcgcagtgaagtgattggagtctttcttaatcacacgcttccagccccgacccttgaagaagttcttgatagcagtgaagaacccgatcttctcgtcttctagacggaaaccgacatttcgagacgccacgcctacttctccgtccttgtgccagatagtgagagacgaaccgtccaatttgaatgtcacttcaaacttctcgcccttctgatgagcctgatcgtaagccatctgaatattttgtacgcgagcctgatccgtcttcgggatgaagttggggaaccctagcttggaagtgccagtccggctgcccttgttgcctccattgatagctgcctgctcggaaggctttacatacttcaggatgcccattcgatcggtaacatcttcgtctactttcggctctgggctgcccgctgcatgaacaggtacgatcaggccttgactaagctctttacgaagcttcatggtcttgattcgagaatactcttttccaccttgttcgaccatattacggcctcgcaggaattcaaagatagggttatctacaggcaccatggaatccacttcaatgtagattgccagatcaccagcctgatattcccctcgtttgattacgcactgccaaccaccaacaagcgccagatcgaggctgtcagcgttaggatgggtcttcacatcgtcgatacgcaccactcgggctagtacgcggtcttgggaattactcatatattatcctccttgtttgaaaattggtatattacttgttaaaccagccgagatcaatagcccgctctagggccagtagcagattctcagcatctagaaggtcacggatcgcgatccaactaccactgtctcccggtagaccgtctgtgatatacacaggtatgtcactgtattcgctctttttaagcccgcaggcacaggctacattgtccccgaagacaatctcgctgacttcccttgcctcgtctcgaatatcgatcttcacacctaccctcctgttgtgttgaaagttgttgtattctgcccggatatcttcgcagtgtcaatagccttgacaagaaaataatccgtgatagagtgaggtctctgctggagagaaatgtccacgtcactcaccggccagcagtatagcgtatgaagaggaaagctgcaagcgcaacctgagtcgaatctgagaacagggcagcgacgacccgaaaggggaaagctcagagcctataaggaacccatgttccccgctcaccgactcatctgcatatatgtatatctgcatgagagcgagaggtagaccaaaggcatgtcttaggcggagattccgtatggcaagccttgggacaggtctgcctccactaccgatctatctgcataaagggggtacaatgtattcagcaactgttgtgaacagacactacgagaaatttgatgtgtatataggaagggggagcaagtggggtaaccccttctcccacaaggaaggcaccagagccctctacaaagtagatacagtggaacaagcaattgagtgcttccgaagtcatctttggcgtaacataatggaaggattaatcacagttgatgaccttctggagcttgacgggaagagattggggtgttattgtaagccccgtccttgccacggcgatgttctggtgagggcaatcgaatgggccaaacaacacagaggagtgtataaatgaaacatgttatttaccgagaagacctaatcgacctgttacgcgaccgtatgaagctccaagcgctggaggctggtggcgttgacaactgggactggtatgaggcctcgcttatcgactgcggattcttcgatgatgacgggcgtgagcttgaggtcgaagcacttgcagattgcttcccaaccgtaggtgcgtaaccgtggaggagtcgaaagctaccttcaaagacccttaccctaggttcttcgacgcttctcgtaggtatggcgaaaccaacgactgcatggtggtgagctttgcagtcgtatggaacaccacctatgaaaaggcacaccagcacctgaaagtgaagtgcaagcgcggttaccggcaaggggctactcagaagcgcttcagctacgcagacacttggtgccctaagacccggatgctctaccgggaggatgctaaggataagactcttaggcagtttgctgaggaaaaccctgaaggtcggttctggatcgcggtaaagggtcacgctattgcaatcatcgacggagtgttgtacgatcacactaatgacaaaagacgcaccatctggcactgctggcaagtgtggcccggggaggcacctgagaaaatcgagaggaagcctgatccaatctcacctcctgtgagaaaggccccagattggtatgtctgaagattacaactgaggaggaattatggaaattatttcgagagggacgctccctcaagaggttttgtttacggctaagtgccaccactgcttgagcattctccgggctaagaggtcggaacttaagtatgtttcgttctcattcggacgccccggggagactgggtattatttcgcagagtgccctgtgtgtaacgaagaggtgtctgcttgggttgtggttcctaccagccctgtagcacctcctcccactgtagagtatatcacaaaggagcgtaaataatatggaccagttagcaggattcatgggcgaacctttcgtaattgcgttcgactacgacgagacgatcagtctctaccctcttgccttccgaatcgtcatggataccttcaggggctttggaggcgctttcaatgtgatcgtagtcactgcacgccaccctgacaacagcggagagttagagtggctacgggactacgggttcccgatctatttcacggcacagaaggcaaagcgaccattcatggaaaatcttggaataaaagtctctgtatgggttgacgacaacccgttcagcgtggataatgaccttcctccgtggacagcggagcaatacgacgcctaccttgaggcaaagaagcaacgagctatcaacagagggagtaaagcatgagcgagattattaaggttgaagtgggagatcgggtggtccttaaggcctattgcgatacatacactggatgtgcaaagcgatgggcgcaggcgcatggtcgtttgcatgaactgctagctacggggtttgtagaagacagttgggtccacaccgacgaactggccggaggcttgaaaggcaccgttgtgatgactgaactgggactgaaggaagagtgctgtgcagtacgtctagacgcctacactgaccacagggctgttgtagttgttgacgcttctgatctttacatcgcatgtaaggcagcaaaagctcccgtaagcaccctagacgaggccttcggttgcgaccacgactaccttatggaatctccggctaacgctcagcgactgaatgagtccgtcgagcagctacgaactggccaagtcgtagaagtggacgtgcctatgagtgtaaagcaagacgaaactccacctgtcgtagtgcatgtagtagagaagatttacgataggaaaggtaacgtacacctcattctacagtatgaggtagcaggggcgctaatcaggacggtggttgaacagggagaactcatttacttcttggatgaaatgcaaggtatgtacttgaccaagattcaattggaggtgaacaatggagttgtatgaccagtggcgtaagtatatgagcgtcgtaatcttagaagaagaagataatgagcgtcagtgcatgcggcttattgaggcagttggcgaactcgatccctatatccaagatttcctagattctttctctattaaaactgaaggaggtgtgtaagcatgagtcagagtaagcgcgatgagattgtagttgaagcacgtgggctagagagctacttcatttcccactggaacggctgggatgtgatggacactgcttgtctcggattttatatcaaacctgagtatgttcttgacccggatattcgagagcttgagcctagcttcttggagcttgatttcgagcgttgccgtttccgattctggggaaatgaagacgaaggcgtggacggcaaactcatggagggcaagttgcagattatgaccaactccttcgagtacgtcttcttcaaggaggtttgagtggctagacagacttacgagtctgcatcagatagggcggtcgaggaggccgtccgttctgagcttgaagggcggtggaagtgttctcttcataagctacctagagcccactatatggattgggcagcctgccggaatggaaaggttgttagctttgtggagcttaaggctcggaataatgaaatgcagaaatatcccgacttctttgtgtcccagatgaagtggctccatgggatcgaaatgcaaagggtgtttgacattcccgcattccttgtggtaaagtggacggactatacaggatatgtcaaaatgacagccaacggcgtcaactacatgagcatgggtggcaggattgaccgtggagactggcaagaccaagaagttatggtccatatcccgctgaaagacttcacacgtttataggaggacacatgaagagactctgctaccgttgcatgcatcttggagagcctgtcatgctccgtcataagacgggtatctggtacaagggttgtagtaaatgtggatcaggagtattctatggctaagaagaaccctgtattcaagtttctgaatacagtaaacaagccctcagtggagagggataaaaccaaatacaggcggaagcctaagcataaacagaaggagcgattaaatgaagaagggtgataaagtgaggatcaatgatgatgctgataccatcttccggggccgtgttgccactatcatcgcagtagacgaagagggttgcgttatcgacgttgggagttacgaggatgagagcggagagctgatcgagtaccttcacctattctttgagcgttctgagttgtccaagcaggcgtaggagtgtataatgaacggacccgagtgtagatggtgcggagagaaaactgaagctgagttcgtagacgttgggcttggatggacgcagcaagtcactggaggcatgtgtcaccagtgtggagggtacgagaacggttactaccagaacgacggaaggctcacagaggtcgagtttgccacctactggagtggtccgttcgaagattatgcggatttctcgccattcaatcatatgagagaaggcgactcgccatgaaggctacactgagaaaccacaatctgctatacatctacttccacacgttctcggaaatgaatgagtggttgacagagaacgctgtagatcagtggacagtcactactctgggctccggctatcaggtggctgttcctatggaccgtgcaatgcgggaccaatacgtctcggaggggggttgacacgaacacaaggtgatgctaaactccgtggttgtctgaagtaaggaggttttatgtccaaaatgaccgtggcccaaattgcggctatgcacggtatcgatctgtattctgaccacaagaccgcttgtccccaatgccggaagaaaggcgctgacaacagcggagacaacctaaaggtctatggtactgatcgtaataccggggaacacaaaggtgcctattgttgggcgtgtgggtacaccttgctctctgaagagcaggaaagagacgcccggggagaagacgaagaggagtggaatttcgtgggaactgaatttaacgcagagatcaacgctcaaattaaagagcaatgctcgtatgatccgcgtggttatcgtggcctgtccaaggaaacttgccagtatttcggagtgctacatggtttcgacccggagactggcgagattgcaactcagctatatcctactactactaattatgaactcactggctacaaacagcggatcatgccgaagaacttctcagagcctatcggcgagaccgggaaggattgcgagctttttggtcagttcaggttcaagaatagcaacagcaagaaggtgcttattgtaggcggtgaggttgaccagctatcagcattccagatgctcaaggagtatgatgaccggcgagcaggcggtaagagtgattatgaaccgactccagtggtcagccctactatcggtgagagtggggcgtggaaacagctacaggctcagtacgagtggctagaccgattcgaacaaatcatcctctgtttcgacagtgatgatgcaggacgagaggcagcagacaaggcagccgataagcttccgaagggcaaggtgttcatgatggaaatgaaccgtaaagaccctaacgagtatttgaaagctggccgtcagtcggagtttgtcagtgcattctatcgagcccgtacatggacccctagcggtattgtagggtctgatgcactcgacgctcgaatgtatgaagctgtgcaggttgagaagattcctctgccaccgttcgctaagaagctccagaaggctatggcaggaggcatcccgttgggccggattgtgaatatcggcgctgcatcgggcatgggtaaatctactgtagtggatgagttcactctgttttggatttataactcgcctcatatgccgggtactgtgactctggaatcggactgcggggagtacgcaatcaagctgctgagccgtaaggtaggcgagaaggcagacttgtacgagaccgttgaagagaaagtggcgttccttgatcggcaccgtgacgctcggtacgacttgtggcacaaggaagacggaagcccacgcttctatctgatcgatgaccgagacggaagcctagcagccctcaaggctcaaatcgaacaactgattattcagtttgagtgccgtgttattattctggacccgcttcaggatattctggacggattgagcaacgaagagcagtcggtattcatgcgctggcaaaagggtatgaccaagagccaccgagtgacgttcatcaacatcaaccacgtccgtaagagtggtggtggtcagaaggctaactcggcaggtgctgaactgtacgaagaagatttccaagggtcttcgtccatcttcaaatctggtgcagctaacattctgatgtggcggaacaaggacgcggagaacgagttcgaaaagaacctgattaacgtgaagctctctaagtgccgatggactggccgcactggaatgatgggcaattggtactacgacgttgagactcatacaatctgggacttggacgactatctggaccgataccctgacaagcgccgtgaacacgaggcttggatggctcagaaggaagaggaaggccgggacacggaatactaaggttgacagaggggtgatgcttatgtatcatccctttcgtcgtttacaggaggaaaggaaatgcaacaacgatttgaaacaatcgagcaatacctcgaatggatgggaaataacaatttcaccaacatgacttgggatatcgaggccacaggcctgttggatgaaacgtctatcgattacactgccagcccctacaagattaagcctagctacaaacaccactgcattgtagtggaggagcacggtggcaatattctggcattctacgatgggccgacctacgtctttgacgggcgagagtacactgagagactgccgaaagcgtcttccatgctccacactgaagaagttgtgactctcaaggactacactccggtagagtatattcacctgccgctgaaagagttcaagaactatgtgctcaagcgcaagatcaagcgcgtagtggctcacaacatgattaacttcgaccttatgtcgatgaagcttgtggaagatatggacttcactatcggcgtagagcacagggatggcggtctgactacgtggtctgctgacacttggatgggcaagcaagtggtattcgacgataccctcgttatctccaagacttgtaaccctgacctgttcggcggtcacagtctggataagctgtctcgtcgtgcaggtggtgacaccaagattgacttccgtaagcatttggcaccggatgttcgattcctcgacttcgcagccgatatgctctactactgtatctatgacgtaaaggcgaacaccgctgtatggcattggttgcaggaccacgaagattaccaactgtccgaccgtgacaactacatcaagaattggctgtccccgattcagttggagaagaaggttgcagagatcatcacctatcaggagcaccgagggtttgttctgaatgttgatctctgtgaaaaagctgtgaaagacttggacgccaagatggaagagcgtcgggcccgggtagagcctgtgcttcctcctcgaccagctaccaagaaattcatggcagactacacaccgcctaagcggcagttcaagcagaacggggagatcaccagctacttgcagaagtttattgagcggattggggctcagttgaaagagggtgacgaccggacgatgatcttcgaaggcaaggagtacaagcttccgcttcccgctgacgtaccgctgaagacggaaatgcctgctaagatcggggacacaactcacatcaagcaatggcttatgggtgagtttggttggattccatcagagtggaaagagactgatctgactgtggatcagaagaagatcaagcttccgatggaaaacatcgttgctaagatcgatcgctggctggatgtaacgtatagcacagcgtacaaggaagagcggctggacgggttcggggattacatgaagatcacccctcgtagcacccgcgcgtatgtacgtcagaggttgattgatcgtgcaagcaaggggagctgtaaggttctcactaaccctagcttcacaaagggccaagagaaagaaatgtgtccagacctcgaacgcattgcagaacagtttccgttcgcgaaggatgtgattgagtacctgacctttaagcaccggcgaagcgcaatcctcggtggcggcatggactgggacgaaatggaggatggagaggagccggaaaaaggttaccttgcaagcattcgtcaggacggcaggattcccacgcctgctgacacttgcggggctgctactagccggatgaagcaccggaaggttgctaacgttcctcggatcacctcgttgtacggggctgagcttcgagagttgtttggggttggagatgggttcttccaaattggatacgacttcgattccttggaagcacgtaaagagtcggcctactgcgatcagtacgatccgacaaaggaatattgcaaatctcttatgatggagaagccatttgacgttcacacaatgatggctaagcgtatttctgagatcattggtcgtcaatttaaccgatctcctgcgaaaaacgtaaaatacgggtgtacgtacggtgcccaagctggtaaagtggcaaaaaccattggtgccgatttgcaaacgggtcaactggtattcgatgcgttctgggatgcagcattcccattgaaagctctgaaggacgacctcaccaagcaatgggaagccaatggcaagaagtatatcattggagtggacggtcgccgagtccctactcgttcggctcacgctatcctgaacagcttgttccagagtggcggtgttatctgtgctaagcgggctatggtgattcatgatgtactactggagaaagaaggtctgaaggttgactttttcaaagaagactggaagaacaagccggaattctgccaacaaatgatcgcgtaccacgacgaagcgcagttggaagttacagctaagtcggtcagcttcaagatgttcccttggtctcttgtaggcggtaagccagaaggagaaaaggaacaggaggaggcggagaagaagctgaaagctctagctcaggcttacaaggacgaacaattggctagtactggcaaggtgtggagtgatatcgcacactacagcaaaggtgaaggcggggtgtttgtagcttactgccgcgctggagaacttgccacgaaggccgtgagagctgcgggagagttctactctactcctctggtgcctatcgagctgaccgctggctacatcgttggtcgatcttggaaggattgccactaaaactggcattaagcgaggaaaggggcttgacaggcccctccgcctcctatacaatggccacatattcacaacatacaaggagaaacacaatgactctggctttcattatctatctggtaatgaccgtattcccagccttgtcgtcggctggtagctttgccctgatcgtcaccatcatcgcatgggttgcaggagggttcgtttacttggcatccattggtggccgagagaattcggcagttaaagccacactcaaaaatcacctacggcccttgacgttcaagctgtttctgcctatcattgtaatcggccatctggtgccttcgtctgagacggcatggtggatggtcggcgggtacgctgcacagagcctctatcaagcagacgctactcagcaggttctcagcgaatctactgaactgctcgaagctctggttaagcgggctaagaaagaaactctgaaggctgttgaaggcagcagcgagtgatacggtaatcacagaataggaggtatggtatgaacacggctcgactctacgtctacggcaaatcgtccatggtaggaatcactgttgacaacaaggccaatcgggagtactatacctctaaaggcttcgaggtatcggagacaccgttagcccacaaaagcgtggctaacaaatacaaacagaaaggaggtaaataatatgtctggtgttattcccgggactatcgtcaaactcactcaagtgggatgtgacgtcaccgttggctggccaaaggaagcccgatatgtaggcgcatacgcagtcgcagtagatggacgcgatatcggtctcccggaaggggaaatccggttctgctcccttcattggtccattgaccgagacgtcaatgatggacttggagactaccaatcgatgctcgctgacaacgaccgcttcgaaattgtagcagttccgggcaagaagtattacgttaagaacgttgccaagcacagcgcacagatcggccattacttggttccttcggagccagccttgtacgtaggtttcgagccgtgctggctgaagagcatgcacgaaggggagagcccgttctgcatgacttttaaaggacgcgttgacattggcggtgaaacctctgacaagccgcagttccagaccctctaccctgagctggtactggaagagtttaaagaagaggcggagggcaaggttgaagctccggttgacgaagagaagaaagaaaaggttgcaaagcctgctgtaatgggttatgctgttctcgatgcagacgggagtcctcttaaattctgcctcactcgcgaagaagcccgagccaccaagcgctggtggggtggcaaggctgagggagtctcgattgtaaaagtaatcaaaggagaggaggtgcgttaacgcgcttctcctcttgcagaatccgggaatgtccggtatgatcgtcagtcaagtggctgacacactcgcccagtctagggtacttaaataggagaaatgaaatggcttttaaactgaacgtaaccaccaacactcaatccggcaacggcggcgtccgaaaggaagtcgattgggatgctctgaacaaccacgtagttgaagctgctggcactgccgctaaagcgcgttcgatcccgggttatatctccggtatcatcgatctcggcgagcaagagcagaacgatgcagaggttgtgttcactggcactgccgaagatgaaatccaaatcatcaaggaatatccgaacacttacttcaaggatggactggacaagcagactcgcaagcctgtacgtctgaagtgctggccgcagcgcgatatgcaacaaatcgcgatcactgtggacttccctcagatcgaggtagacaagagcctgtacctgaccggtaacagcaacaagtctccgcttcgtgtcctgtacaacggcgactttactctgccgggtcagaagactaagattgttggccgtccgtttaccatcaaggaagtgaagcacccgaatggcaaatgggcgttcgccaagaactccatgttgcacaaacttgctgtggctactggcgtcatcaacgaagacgaactcttcaccaaggaccgcgtaggcgagcttctgggcaaggtggctcagttccaagtgcgagtgtggatgaagccgggcaagaacgatatgaaattcctcactgaggatatcagtctggtcggtatggttcctgaaggtgttccggttcccgagctggacgagaagtacatctacggtgtcaacctgtatggcgagaacgacgaagaagcagtcaagcaactgcgtgctaacgtcatcaacaccatcaagcgagccaagaactacgaaggttcggatatcaaggcgatgatcgaagccgttgaagctgcacgcggtggtaaccgctccagtggcgacagcgaagagcaagctgaagataagccgcagacccaagctgcacctaaagtggagccggttcaaaccaacgtagatgatgacattccgttctaaagggcggtggtaagacaaggggcttcggccccttcctttcaaaatttcaaaggaggcaacacatgcaaatcaattttggtcccatcttccttctcgcagcaatcgtcctgtgcgttctgaaatctgccggagttctcgctatctcttggactgtggcactcatgcccatctggattcctcttgtaattgtattgtcgattctcgtactgtttcttgtaattgtaggtctgatttacgcattcggcgatcgtactaaactgaactttagctttaaaaagcacttccggaataagtgaggactaatgatgagtagtttggttattgttcgagtacctgagtacattctaaaaggccccacagtaaacaaccagttcagcggtgacctgtgggagcgaaatctcttcaaagatttgaagaacgctgcggagtgtatcattaaaggagagccggcttatgttgctcttcctaacaaggtaaaccctgacactctacaaacagagtgggacattcaggttgtacagttctaacccaaggggagcttcggctccctttttcattggagataaaaatgagtgaaaaggaagaggatatcgtcctcatcgacggcgaccttatcgcctttaagtgtgcaagtgtcaacgagacccgctccatcattgtcagaaacaaattgacaggagaagaggaaacttggaagaatcggacgacttggcgggagaataacaaagacgaagagggattcaacgaagacaacttcgaaattgaggaccatcaagaccccaagcacgtgtcctacggtatctctgttgttaagaccatgatcgaccgaatctgccgccaagctgggtgcaagcagttcaagattctcctatcaggccctgataacttccgtgacgccatcccactcccgaaagaatacgagattaccaagggtaaaaagaccttcactcgtggtggcaggtacaagggtaagcgtacagggcagattaagcctcttcagctaggtcagctaaggcagtatatgatcgaagcgtatgacaccatcatccatcccggagaagcggacgacttgatggccgaaatgatgtacaagaacggtgtaagctactccagaggggagactactcagcgcgtgatcggggctaccatcgataaagacgcagacggcactctaggatggctttgtaactacgaacgtgagcctgttcaagtcaagttcatttcaggcctaggatcgctctacagggactctaagggcaaggtgagaggcgagggacgtaagttcttctacttccagcttctattcggagaccctgttgactgctaccgacctgctgacctgtgcatcgggaaggacttcggagaagtggcagcgtttaacatcattaatccctgcacaacggacaaggagtgctggcaagcaatctacgacacctacaaatcgtggtaccctgagcctgtcacttacacagcatgggacgacacagagcacactaaagatgcaatcgatatcatgcaaatgtattgtgactgcgcccacatgcaacgttgggcgggggatcgggtagactgtagggctgttttggctaaactcggggtagacttaggaggtgcagaatgagtgtaaggcctcgcccttgggaagacttcccgggcatctggaagaccgaagccgcgttcttgagttgggtcagaggtggcattcgccgctatctctggtctaagaacccggtcaagcttgagtttgctaaatcccgaaggatcaagatagccaacaccaatgaaaagagcaagctcaggaaccccactgtatggggctatgtgtgcgagcagtgcgggaaggagactcctcaagctaacgttgagattgaccacaagacgggggagttctccctgaagcgagtagaggatatccaagcgttcgtggaaggtgtggtgtttgtccgcataggagatttggctgtcttgtgcaaaccgtgccatgagatcaagacctatgcagagcgttacggactcacccttgaagaggcgggtatcgtaaagcaagctattgcaatccagaagcagaaagggtatgataaggccttcttgcaggaggtgggaatcaaacccgcatccaacgcagagcttagaaaagaacagatcattgaataccttaagtctaagaaggagggtggatgaacgaggatcgggtttacattgtagtaagagacgaggcaccagagtacatggtgccgactctggttgcacatagcatcctaggggcagacatggcaatggttctcctcggacaggaccgggccgttccatcgacggaccttccgtcccgtccgtatatgcatgcagcggcaaaaaccgccattaagtgggtggagtggaaacagtggagcttccgtaagatcgttgtacgagtttctgacaaagagtacgataagatcaagcaaatccctttcgtatatgaggggtatgagagaaccatctgcaatggcgaaggctcctgcctagtagtacctcctctgagcaaagaggagaccccgaatgttcttaaatttgcaaaattatggaggcctctgtgagagagaagtttttgagaattatgcggaagctgcccatccgggtaagggcttcccttgttatggcttggattgctctgttcttctggctcccggttgcaactgcgctaatcgttggaattctagagttcttcgataatgcaaaagaagagttaagaaacggatactctgttttgatcgaagctgccaagggagcttaccagtgcattaaaacgggagaggagttggagtcatgaccaatttagctacgtatgttatacgccacaaaaagaccaaagagctttggaccactcctaaaggaaagcggcaatggaccacgaaaggaggggcagcccgagcttggagaaacgcatatgagagtactacactaggagcgtactatgctaaaagagatatggaacggtggcctgacctgaacattcctttgatagtaggggccgctcccgcacgtctggccggctgggaagcagcatcttttaaaaaccaatcagctttcgagattgttgatattgctgaatccctgaagcacgaaagccagttggtgctcgatctactgaaagatgttattgggttcgaagtgccagaccacatcggagacggatatgtccgactcaccattaaaacgtccacatacgacgatatcatcaaactactgaaggaggcaaaatgagcatgactgacccccgagcgtatttcatcaaacaggagctggaggaagcaacgaagcttctagaaagagccctcaaccttctagataacgtccattgctacgatacagatgtatacgaggacattgcagcattcctctacggtcaagagtgcgaggaggaataaggtgcagcgcgatattagtaaaactatagcagaacttcgggacttgatcgaagctgtctctatgctcgacgaggccttggttatgatgcagaaaaacggactatatgatacggacttgtacaaacgtattgatgcgtttttgtattatcaaccgggcgagggcgagtgggaggaagtagaatgagcagcaagaaacactttgtaatctctgatacacaatgcaagccgggtatcagtctggactacatggaagctatcggtaagtatatcgtagccaaacgtccagatgttgtgattcacatcggggatcactttgacctcgccagcttgtcgtcttatgataagggtaaacgctcctctgagggccggagatacgccgaagacgttcaagtcggacgtgagggtctggacaggctgttcaagcctctgtgggagctacaggagcgtcaacgggctaatcggaaaaaggtgtaccaacctcggttgattttcacactgggtaaccacgaagagcgagcagaccgagcggccaacgacaaccccgaattgtacggcacggtcggaagtgaggaactgggtattcaggattatggttttgaggttgttccgttcctgaagcctatcgaggtggatggcatctattacgtccactacctacaaaaccacttcactgggaagcctctgggtggcacagcgaacaacatgcttaaggctgccggtcattcgtttgtcatgggccaccgtcagcttctggactgggcgatccatcctacaattgacggaaaacaaaggctaggcattgtgactggagcgtgctatcctcacgacgaggcttacaaaggctatcagggtaacaatcacttccggggttgtgttatgattcacgaagtgaaggatggttttggtctgccaatgccggtaagcctagacttcatgatggagaaaggaggtttcaaatgacggtttataagttctggtgtgaatgggatatcggtatcaatgagtgcctgtggcgagactactaccagatggaagaagatgtagctaaagccttgtcagattgcgggattgatgatactattgaggaactggaggacgcaggcctgctcggcttcgactctgttaaagttatcggctaattaggtaataggagggcatatggctgagtttttccttggggcggcccttgcaggcttgttctttatgtttagtatcactgcgagctttaccgccgaagatattgagaaagtgacttcaacatgcgagaataacgaaggcgtcaagtatttcggagttgacttcttcggagacggtgctgtacactgcaacagcggcgctattttcaaaatcgaccgcaaatctaaataatcgaaaaggagatataaaatgactgatttcaacatcacccctgagcaaatggaagaagcaatggcaggtatgaaccctgagcagcgggctctggtagagaaagccttgaccgaccgtaaatctctggaagattccatcgtgaccgaggacggtgaactggactatggcatgcttgcacgacacatccgcaccagcttgggtgatctgcctctggtaatgggtggccctgacttcctgaagctgatgatcttggttgctgcgatgccggagaccaaagacgatctcctgactctgcacatgaacctgtccttcattctggactgcattcgtgaatcgattagcgacgaggagtaacaagtggccgaagagattgtaaaagaagacctatctgtcgacgatctcatggttgactcagcagggctagatgccctgctggccttcctagagagtcagtttaaaggtccgaagggtgtactgaagggatatgtcactatgagagtgatgtgcgctaagatcgagagtcttgacgggtttcaagagttgaaagatatggaggtgaactttgagtaacgatatcatcaacgttcatgctgggcaaccgatttctctggtgcaacggtcaaagaatcctatcaatattcaatattgggacgccgataccatcccttacggaacagtcttggttgttaccgagaaaaggggtgatatacgaaagggagaattggtcgtaaggctggctagtagtgcagatgatgagcactctgttaaggtatgtagattctctgatttcttcctcctaatggagaggggttatgacgcagccagtctcggcgacgttaaacaagcgtatgatgttctgttcgaagatcacccagtgactacctttgttaactgggatcgggctcagcctttgacaaacagtgagcgctactacggagactttctgattggcggcgaccctaaagggatgccactattcaacatggctgttcttaaaaatgttctgtcgccttacactgccgacgatgaggaactttcagctatgtctgggaatcccgagacagtagagcacaaagaagttgacgaactaagtgagagggacgaggctttagccgaggtcgacagactcaatgaagagcttgttgcactgggtaagaaggttgtgttcgccaacctagaagattacctaggcaaagaaaactatgccacattggaagctatggctaaccacaaggaggctgtaggtagcggaggctcctctagttactacactgtcaaggtgaacaaccccactacgaaggctaacatgccgtattttgcagagtgcaacgatatcatcgaagcgctggatatgcgattcggtcaaggcaacatgttcaaagcgttgtggcgggctgcggcagcacagaacctaggcaagctgaaggccggtaacgatgttatccgggactacgagaaagtcatcttcttcgctcagttggagatcgataagattctcagagaaaggggttgacattctccccgaggcttgcgataataggctccaagttgaaacgaaggaggtgtgtagatatgatccagaaactaaaacagaagctcatgatggtgcatcctatcctcgctagcgagatcgtctggtgcctcaccttcgcaatgcttcagtaaaacaagggagcttcggctccctttattgtatcaaagatttaataaggagagtttatgcaaatttctgcaaaagtgattcaacacagttcccggatcggcctaggtacgaagaatcacagattcatcactacattcgaactggagtatcctcggtttattcacagtgaacttatgactcaccgactttttagtcgaaatgctgcaagtagtcgtgccattcccgttgcccatatgatccgacaggtggaagagaatcctgcgatgcctgttcactggggaatgaatcaaccgggtatgcaagctgagttcgaactgagtgagtgtttgcaacgtagctctcagtacctgtggaagaaggctgcaaagagtgcggctcggatcgctagcgcactaaataaaatgggactccacaagcaggtggttaaccgtctccttgagccgttccagatgatgaagaccgttgttacagccacggaactagataacttcttctacctgcgttgccataaagacgcacaaccggagatcaaggttctcgctgagaaaatgtatgaggctcttattaaagcgggcccggcagaggctctatatgacggagagtggcatgttccttatgtgactcggttccgcataggggatggtaagctgcgttacgcagattgtaacgggcaagaactgagcgtagaggatgctattaaggtatctgctagctgctgtgctcaggttagctataggaagaacgacgagactctggagaaagctcttgtaatctacaaccgattggtagatactaagcccgttcacgctagcccgttcgaacaccaagcaacaccgatgctccgcatctcggacaatcaaactggatgggaggacggtgtgacgcacttggaccaatatggtgacctctggtctggtaacttccgaggtttcatccaacatcgtcaactaattaaagggcacgtatgtaatgagtactacggccaagaagaggaaggagtttaaaaatggcagaatataacctgagtctggaagacctcatgctggtcgatggcttcaaagaggcgttccagagtaacaatgagaaggtagtaagggagcatctgtggactaacggcatggatgttaaaaactactcgtatgaaatggttttctgtcagcatcgcaccctgattggccgagtcgtagagggtctacgattctctggctttgagcgtacagacaaggagtggctgagcctcggttgcgcctctctggaagctcatattgcagcgtgtgatgatagtaatctacggttcactcttcgtaagatgcgaccagagggatcgacagaggcaacgttccacaattaatgcagtaggagtagatatggaagttacaaaggctctcgtagatgaggccgatattttcaataagatcacacaaatcaggactccaacggagtcctatgcccggaaatatccggtcattgtcgaactagcaaaccagcaactagaagagaagttgtggttctctagcgaaatgaaggtagagctggataagttgaacctgaagtttaagttggaacctcatcagcttcacgctgtaaagactgtccttcaactgttcctcaaatacgaactgatcgtaggcgaggagttttggatgggtaaagtagtccgaacgttccctcgcccagaggttaaactagcggcttcgatcctgtgcatgatggaattggcagtccacgctgaattctacaaccagatcaacgtagtgctggggatggatacagatgccgactacgtggcgtacaaggatgacccggagcttatgggacgtatggagtggcttgagtctgtgctaggcgacgaagacgatgttctttcggtaattatcttcagcctaacagagaccgcccttctgttcagttccttcgctatcttgaagagtttccagtgcaacgggtacaacgatatccctgtgatcgcacgcggggctaaccagagtgctgtggatgaagacttgcacggtgtagtttcggctgagatcatcaaccaatactacgcagagattggtcgaccattgtctgaagatactcggcgtgtcgagaagattcgacaagctatcgaccatgtatatgctcatgaatgtcgtattgtcgatatggcgatcccgggcggagaacttaacggcgagtcggctgaaaactataaagcgtttgttcgttatcgtttgaacgtatggtgccgtcgtctgggtctggaagatcatttcgagaacgatgacactccgatcaaagattggttcgaaatgaacacgtacgcttacaaaatgattgacttctttactccgggaatgggcatggagtacgaactggggtgggatgaagaggaactagcaaaggcttgggaagaggagctgaaatatgagtaagagagacacattcaactattccgaagctaggaaaaacagtcaagcagcaggagagactcctctgtggtatacgacggctggctaccagttgttcatgaagaaatattcaaatgagggagagtctgttcgctctcgttttgagactgtagccagagctatggctcagcacgcccctacggtgtatcctgagtggtgggaggaggacgaatacactagaggcaaggactgggaacaggtattcttcgacgttatgtgggacggttttgtaagcccatccactccgcttctgtcgaacggtgggctccgcaagaagggcactacggtatcctgtgcaggcgggttgatggacaacaacctctatgaccgttacaatgtaatgacggagattgcagtgctaacgaagcatagtcacggcacaagcttcagcctgaccaactggccatccgaaggcgatgccattcgtggcggagagtcacagggtgttatgcctgtcattcgtgacgttatcaacgtcatggaagaggtcgcacagggttctcgtcgtggtagctgtgcctacagcattaacccccgccacggggacttctggaacgttatcgatcacctgtacaagcgtacagaatcgaacaacgtcggatggttgctggacgacaattggtgcaaggctatggccgagaaagaccctgaaacgctgaaacgatggaagcggatgatgttcgttaagctggcaagaggcaagggctacttcacgttcattgacaagatgaaccggcacctcgcagagccgttcaagcgagcaggtctgaaggtagaggcatctaatctttgccaagaaactgtgcttccagctaatgacttctacacattcagttgcgtgatcctaaactataacctcgaactctaccgttcttggcctgagcatctagtgttcatcgggcaggttatgtcggattgcaacatcagcgagtacctcgcaaccatggacgaagttagcattcaggaccgaagggctctggagaagatttaccggttcaccaaggacttccgagcacttggtagtggggttctaggattccatactctgctccagcgggaacgattcccggtcggcagtatggacgctatgttcctgaacaacgccatcttcaaagggatgaaggagcaagcggaagcttgtaacagttggctagctgaggttctaggggagccagagggctgccgtggactagggaagcgtaatgccactacaatgatgatgccgccaactaaatcgacggcagaactcatggctggggcttctgagggcatcggactggacgttgctatgtgcttcaccaagcagagcgctggaggtgaattcttccgtgtcaacaaggtgttgctggagattatccaagagcgaggccttgattgggaagagtgtgcaaggcagatcaacgaacgcaagggaagtgttcagcacgtagactggctaaccgatcatgaaaaggctgtattccgtactgcctttgaggtgagaatggaagactacctacgactgtgttcccagcggcagaagtacatcgaccaagggcagagcatcaacctttatttcacgtcgaatgactcgccggcttacatttcgtacatccatcgtctcgccatggaagacccgaacatcctatctctgtactacatctacagtatgagaggagcgggagatatctccagaacagaagaatgtgaaatgtgcatgtaaaatcattggcccggggcttgacagcttccgggcctttgtgtattctgagcacatcaaaacaaggagggactaaaatgaacaaattctctgaagtgtactacacttggagcgcagcgtgctctcgtacaaatatcttgatagatatgggatggactgctacaatccgtcgagacttcactggcgggatcaaccctgtatgggttgtggagttcacgcgatgaacagcaaactccgcaaagagttcgataaatggtggggacaggacgagcaagaagaacttcgtaaatcctgtgccaaaggatgggcggaatatatctggatggctagtcgaagaaaagtgagtgttgagcttcccgcgccagaaggcggatttatcgacatccaaaagtacacaatcaatcgctgcaaagaagctatccgcgaaacaggactggaggtgttttaatgaaagaatattttaaaaagcgactaatgcagaccagtgaaccgttcgattcagcgacgcaagctatggacgtagcgattgcgtggggaggggctaagtactgcgaattcacttgcgtaactgcggataatcgcgtcatcagcatctgggagtacaatgacgtagagcctgataaaccggtattcaatggacagcaacgaatcttagttccaacttttgaggaggtagtataatggaacaaactattgataaatctcggtatattgtgcttgataacgaaggtcggcacgttctgaccttgtgcgagaaggccgcctataacctgcttaaaggcgttcagtggacaaaggacaagcatggtcaaatccatgtaaatggtgtcacaggcgttgaactcggagttcgtcaagggattatcgctgaagtattcctgtatccgggctacatcatcctagaagaggtagactaatggatatgttcgataaatacatgcaagttatgtatgaccgggacgctttctcaaggcgagtcggtgagttagaaaaagaggtagccgaactcaaggctaaggtggctatcgctaagtgtgatatgcgtgtcgtgaaaaccctactggaagatatccaatgggtgtatcaagacgaagctatctatactctaccgggctacgtttgcccttgttgcggggaatctgcaaactatgggcatttccaaggcagcttcgataagagcccctgcctactagcttgtgtactgagccggagtgaagcatatgaagcctaatgttgtagactcgctaggcattaacatgtgctacgcctgcggaggtaaactgtacgtccgaggagtatgcactatctactgccctgactgcgagaaggcagagaaagataaaccgttcgtcaggatgcagcttctacaggatatcgcagacagtaagaggcttgacacagaataatattctttgtaagataagcccatcacagacaaggaggagccgagaatggccactacagagaaaattattgagtacgtcgaggtgtgcatatatcgcttgcaggaggacgtgatggcctattctaagggcttcagggacagagccttgtctaatcggacaggctacattcacggcctgattaccatggctgaaatgaatgagcaagtgagtatcgaagactgcgacaagctccgagctaatctgcgggacgcttctgaagcagtgatgaacacattggacttttaaagtcaactaggaggaagttatgataaaagattttgtaaaactcgttggcttgtctgccgtagcctgccttctgcttgtatgtattataggcatgtttgttacagttctgcacagtggggcagagattgttcaatctcagatggaacagaaagacattatcgtgtctaccgatgacggcaccatcaatctcggtcgctccgtgaagagcgagaagctgctgtacagcatgtgcatcaaggtggaagaccgtaagccagcttgcgaattcaccaccaaggataaggtagtacatgaagtgcggcaggtgatgcgcccgggcgaggctactgcacgtgacattaagattgcagttaacgcagcagtgacgtatactggagagaatggtcagaaggctacctccctgatccctccgaaaggtgaattcctgccggcaggtactccgtcagaggtgcatatcgaaacgattgaccgcttgttcgacagcgtgtataatgactacaagcaaaacttcagcaagatgtgaggaggactcatgaaagcacagcctaaagaagtagagaccctatctttcgacaagcgacccaaggccggggatatcgttcgactgcggtccgatggcaaggcttacgaagtgtgtgctgtgtatccgacagcggtaggctgggaggcggcgcttcgaagcgtgtacgacaaaaccaagactgtcactgtcggcatggagtggtgaaatgtccgcgactaacaagtgcgtcaacttcctccctgtcactccggacgggcgagtgatcgtccggttcggtaaaaagaggttaggatggctcggtaaagagggtaaaaagtggtattattacccttatggatgcgaaggcaggatcaaatccgaaggcttcaaaactctgatcgatattaaggcgtggattaaaaaccccgactcggtttggcccgggcccctagcttgagattgactaataagccgacgaatggtacaatgggatgtaggaaattccctactcagtataaggaaactagcaatgactagccgctggaaagaggccgtgtatcgcaagtactcggtacgtcgtctgcggcaggaactcgaagagttcaaagaagctagacgctttgcaccaaatcaacgcatccgtgcatggtttgatgctcatatcgaatttctagaacgccacttggctattcgagagtccggccaagcctacccagacgaccttctgtaattaagtgttgtaggtagagattcaaatcatggttagtggcaaggacgccacactttcagcccgcccacaaggcgggcttctttttgcctgcaattcagggttgacttggagtaccagagcatgtagacttaccccgtccaacacaaggaggaataaatatgaaattcaatatctcaagacagttatgggtggctaaaagccaacggaagggcgattacaagggaacgcccttggcgtacatggctcaagtagacttcaacaaggacggaagcttggcttctagcttcaagaagaagcagcagacaggtgagggctgggcaggaaagagcgctgagacgtgcttcgtagataatgtcccggtaacggggcacttcatcggcgacagcgtggagcgctgggtgaccgagaacaagtacttccgtgtaacggacccgcgaggtttcgttctggaagtcccgaccgggaacatctctaccctgctattcaactgcactgtagtcaagggagtcattcaagagccttgtgtgtgggttcggatgggttctcagcacgttctactgccggaaggttcctctctctacaaagaggctgtaagcttcgtggagcggaaagagtcagccaagaccgttaaagatatggttgcaggggatcgatgcaccctccttagtaacggtacagaggcgaaggcggaggccatctacctcggacgggtgaaactcacttggcaccttctggctcaaaagggccggtactctaaccgtggacgtggcgggtgggcttatcgctggggttaccaccatctggagcgggagttagatagaaaagaattcaccgagaaagattccaagtgggttagtgtgtttgctaagaaactgagtctcggtggacgatggaccctcgacttcgttctatcgccgaaggccactgatattcagtctgggacagttccagaggaacttgagaatctggacttggtagatggtgtaatgtgggagtatgacggagaggatacccgcccaatggcctactactattctgtacctgatagggtagtcaagtgtatcaacgtagacgaccccgcatgggacgctcgatcctacgatgaggtaaggtggactaaagagtggactgtagtgggtgccgagtggcgaaaataagccaccattattttagaattgcccggcgagagccgggctttttcatggcaggggttattttcaaattatttttagatttctgggagtttcggccaatatgggcaatatgaaatttctcaggaaaaggctcagaatgctcgtataagagccgttcgagtgtaggtatggtgagctactacttagccgtagaaggacagtgtaacgcttaataggagggttagaatgaagattgacaacggtggcgaatatgcgtattggctggcggatatcaaagagtttgtttctcagatggatgccacagagatcgagaagagggcttgtatagcatacttaattagctggtatcagcgaagagtactgcacagaattaaacgggaggaatacgaggagatctaagctagggaccggatggatttttagggactggatagattttcacagactgcaaaattgagaactgggcagatttttaggaactggacagtttttcacagaaggggatttttctacagaggaatttcccctgaaatttagccggatttctcagaagggcggatcgttagcaggctatctaattggttagcaagctacctttaatcgttagcacactaactaaaaattcctaggacggacctcagttggcacgaacgttgcaagcccgcaccagtttcccgggcaggcgtaggcctcgactatccgtcgtgaaggcgatatgtagttggggactcgcaccccgcgtttaagatgtgcccattctactatgacagacagctttgtcaacattctttttatggcataggctttgcaattgcaattaacatgccaacacaaatatcaggctcctccggtgtttatctccggtgctcggcttccagcctgcgttgcccgcatgcctactattatacacaagctatcaagagaagcaagaaaaattatagagaaaaatctacacaaaggaggttgacaggcctcctttatatatgcacaatgatctcacattcaacggaacgtcaggtaagcatcatgctacatagtgaagcccgggagatggccctacaagagatgggcaagtggagtctcctcgaacaaggttggaaattcagtttcaatctcaggatgaaacggacgctgggacgctgtaatcatactaagaagctcatagaacttagctacgggtatgtagctgctaatgggctcccggcaatattggatactatccggcatgaaatagcccacgctaaggcgggaccggatcagggccacggatttgtatggaaagagtggtgcggcttgattggcgctaaacctcagcagtacgccagcacaaaagaaaaagtagtcaatttcccgtggcaactggcgattcagcacgactccgggcacttagagcggctcaatcactacggtttcagacggaccaacatggcgaaaaagcaggtacgcgggcgtcctgagacaaagggcagactagtttgggtgaagagtgaaaataagggttgacagcttaggccattcgcgtagaatggccctcaagcaaagggaaacaccctgagcaatcacgaaggataagtagatatgaaagcgctttgtaatcatcgggcactctacgcagcttacagccgtagcgagattgatcgcgttgcggtagacctgaaccgttactttcctatcgagaaagatgatgaatgggaagatggaccgtacatgtaccgccgccggacctatctggtgaagcattcgaagggcatagcaaggtggcacagtctctattgcaatgggaccgtccaaggcgttggcgtaatcttcgacgtaaagtcgggcgaacctttccgcacagcataaggagattcagaaaatgcaagcttgggatgtgtatcagaacggccaattgatcgatactgttttcttcgatatcatgtgtgatgccgaagaggtgcggaaatcgctggtcaatcacgacggatactcgtctgatactactgtagaggaggttgagtaatggatagtctatctgttaaaatcgttctgtcggaactgagctacaaggctctgattcaagccttcgccttgcttggccgaacgctcgacctagacgaggggttggacgatatacttaatcttattgcggatgagatcgctttccgcgacggcctgccgcctttcgcagacgactgcgataaaacagaatggatgctccgtcgatgggaatcgctcccggtggtatcgtacaatatcgggcaggacggaccgattgtcgctcggtctatcgaagtaaaaacggcatgaggggagaactgatgaccgtcagagtaggagatatcgtggctatccggggcgacattcggaaaaagctcgacggaacatgccaatacacgcccgaacaattggtaggtggtaaattcctcaagcatgccggcacgggagaaatatggactggccgagtgagtaagatacaaggtgatatggccaaggtgggaggggcttggcgcgggatcgaattctatgtgctcattagtgaaataaacgcttgacaacctgacccactagctgcaaaatagcactcacagacaacgaagacgccgataggcgaggagaaagcagatgcaaatgtttttcaaaacccgcacccaagcccgtgcaatggccaccaacggtcgcaaagtggtagacaacggggctcaagctgaaaagcgctgggctgtcaagctgaacaaaaaggaggcgaaataatggctaagtctgtcagtgtagatcgcaagcgttccatcctcgacgaggcgaaagacggtagctttttcagtgtggaattcgtcaaggcagacggcaccgttcgaaagatgacgtgcaagcgccagattaaatcggcgtatgctaacggacagtatgccactcgcaaaccgaccagcgctggcaagccgcacctgtataccgctgctgaggtgctgaacatggaagagggtaaatccgctttccgtacgatcaatctcgaaacccttatccgtgcgaaggtgaacggaatcgagtataaattcgattaaaagcttgacagcctaggccattcctgtagaatggccctcaagcaagacaaacttaaacagaaaggagattaaaatggcacgttctatcaaggcttccgacttcgattccgcttaccagttcgaggccgccaaacgttccgaacgtaaagagtcccgcaaatcgcgtgacaatcgcaaagctagccgaggccgagctttcgacttcagtagcgatatgtaaggtttgtgccctgccggcaggcttaaatgccggcaatcctaagcccattcgtcgagtggttttaggattctcaaccccagcggagataccaaaaatggttcgtcaatgcgtaccctgtcccgatgctcgccatgctttttgccttgcatggttgttcgccatgccggagttcgccggtctgcccgctcaaaaggacataaaactctttaagacttcgggacaatgggcggtatgttatggctagacgacagcggctcccgtcgtgggttcaagaccagaccgaggatgaaacgccgctgagggacaggatagacccctaccttagcaagcttggcgaagtcgataagctagagggacaattgcgacgggtcagggatgcaacggacccggacgaatacaacgaaatggctaaggtactaaaagcccgacgccggaagataatgaagcaacgtgcccgggcctacggtctgccagaggatgagcctaccaatgtccaagggtacagcgtaccggaagaggttcaccgtagagccatcctgttaagcagtgtaaaaccttggatgttctggaccatcctgtctttctcgatttttgtgtggtttgttttgaaaaacagttgacaaggttcccgcctcctgtagaatggtcagcaagaaaggcggacaggccgcctagctagataaaggataaccgtcatgcacttcgttcttaacctcgtttccaaaaacagcaaaaccggtcccatgcctgttagcacgtctcataacggcacctgcccggatgcctgccctctcaaggctaaaggctgctatgccgcttatgggcctactgctattcactggaaaaagctaagcaagggtgaacgtggcgtagagtggaaagagttccttaagcaagtgcggtctatctcccgtggggatttgtggcgtcataatcaagctggcgatctcgtgggtcaggatgacgttatcgatgggatcgccctgatggaactggtgaaggctaacaaaggtcgtcgcggcttcacctacacacattacccgatgaacaatttcatgaaccgccagcacgtattgtcggccaatcgtagcgggtttactatcaacctgtcgggcaacaatgtagcgcacgccgatgaactggccgacctgaacatcgcccctgtagtgactattctcccgatggacgcggagaatgtaagctttacgccgaaaggacgtaaagtggtagcttgtccggctgagaaaagcgacaaggtgaattgtaagtcgtgcggcttgtgccaagtggccgaccgggagtatattatcggcttccgtgcccacggcacagcaaagaaaactgtcgatctcattgctaagggttaacacaatggacgaatctgtttacgcaccattcaatcagtgtaagatgatgggcctagaacgaaccgtgcggagcctagcggctcctaacgggtgcaaggtagtcttgtatcaggaccataagaacaagcatagaatcgtcatatacgatgccttagggcatggaatgtctggggtcatggtgcaagcggatggggaaattcactacaaggaaactcgcaaggctagccaagggcagaatctgacaaggcagctacaagctcagctaaccgcatggggagtgaagtggttcccctctcagtatcagacagcggcgggcgcggcctgctacaaaggaggcgagtgatgcggcagcttaacaaatcccagcttaaggccttggggcctaagatcgacctagccttagagctagcttctactggccgtggtggtctaatgaatggccacggctctacctgctacattgcaaacaaagccgggcataacattctgcgggttagctaccataactcccgattcgttgcatatggtgctgagagtgtccgggtgactgggaatgtcattgcagcatgggtggaatggaagggcattaaccgggctgcaatcaacgctctgagtgagtacgggtatcatcctaacctgagcatagggcacaacgatgctcttaagactctgcgtgatatcgagcgttaccagtgacggcctcttactcgacagagaaacggggccagaggtgggccatcatccgtactgagcccggttacagaggtgaccgggtgaccgtgctaggattctgtatcaatcaaacgcacgctcttaaaacggtagccaaattccgggcttggcaagcgctaggctggccctacacactgaaagatgacagaaaataaatgcttgacagcctaggccattccagtagaatggccctcaagcaaagggaatcaccctaagcaatcactaaaggcaggaacaatgaaaaccacagagcaacggcaagcaatactccccggggccgccggcagtcaagcgacgggcgcctactacccgatttactgggatgaccggggctacttcataggcccgatgcgtcactggaaaatttacaatcgctgcgtctgaagcatcaagccatgcttctaataaccaaccatctggagactcaaaatgaaagctgtagcccagttcaaaagtgaagactacgaaagcggtgatagccgtactgctaccgtctatgaggatgtttatggatgctacgtcgtgagcgttttcggaactagcttgagcgaacctgtcagctaccattggggtccgttcgagtataaagaatctgcaatcgatgccgctaagtctgctatctaactgaaaaggggccacagaatgaaaatctccgctattctgaaaaataacctgaagttttacaagaataattcgttcatgtgcgctctggcgttcgataatgtgtccagaaataaagctaccgaggtgcaagaatttatccatcagctactagggcccttcgttaccttgcacgctaagctcaagaaagagataccgggttacgaaagagccgtatatgatgatgagccagaggatgaaatgactttctttgtatcggatagggcctatcaaatgcgttgcttgtggtgggaaactgtaatcgaacaactagaggaacaagggcaatgactcaagctaactggagcaaaggcgtccgggttgtcggcggaaagcgggatggtgagattaccctgttcacaagcgcacacttcagtgaatcgctaggcttatgcgagggtgatccttatctggtagaggctttgccgatgcccgccgcgctccggctgctagtcaaatggaacaagctgtgcagccgaatgaagcttgactatcggtatgaactgctgtagtctgcaatctcaatcaaaacaggaatgctccaatgtcgattctagccttaaccctgaccctttgctctgccgttcaatgtgatgattacattatcgatcactcactcccgggacaagccgcagagtgtaatgctcggctggtggaggaggccgaggagtggggcgatgcttgggtatcaactaacgctgatgcccgactgacccgctaccttagccggttcaatattcaagttgaccctcgctttgttttcgactacgattttacctgccaactcatcgcagaggatgaactaccatgaacgcgccccatctttccctcaagcagtaccgtcaacgtgccgctgtcatcgtccgccgagtgaaatactatgaaaggcgctggctccggaccgtagagtttttctcaggtgctgccgctcagaacatcgcagaacgctttgcctacgctgggcatgctgaagagcaaatgaccaagctcaaggctgagtttgcagccttcccggtggaggtgaggctagatgctctaggttggatcaattggaatactcacaatgacggcctgctagaggagtggattcatcaggaaaccgaccgagccatcatgctcgaatatgacgaaaccacgtggcgtcctgtagcttgctgggaaaccactgtcgatgctcttcccaagctggcaatgctgtaaaatatcgcccgttaggctgaaataatgcttgacgggcgtttttgtacctgtagaataggcctcaagaaaggaaaacagccgaaaggctcaatctgaaacccggagatcgataaaatgctgctagttcatggaaccactgcaaaaggcctgaaagctatcatgaaccgtcgaggcaaggagggattggccgcaccttgggacgtttcggaccatgacggaatgtcctacttttacaacgtaggcaagatggagtggcacgacgaagaggagtatgctaaggcagaatgcatcgttcgttgcctagaacaggcccaattgcagcaggctatgatggccgaaggaggtaaaatctatgctctggtggttgacattcccgaagagtttcaggattgcgtagaggatgattattcgtgccctaacgctagccaccaagctagctgttttccagaggataattttgatccggcatggattgtagaagtgtatgaggcagatgtgagtgtatgggccatccctttcatcgtagccggagtctcaggtaattctatgttccaatcccaccaactacctgacaaactggtggcgatagcggagtcggtggcgcggtccagtgacatagacacatacgaagctttcgagatcgaccattcacaggtggagctatctattctcgaaaatttcaaagataacgcttgacagtctagccaactagcgtagaatgcctagccaaggggtgcataagcgccccacctcgaaaggatacagaaaatggccatcgttgatcgaaccgcaggtaatgaaagcccgaatcactgctacatcgttactggcagcattggaccagagtttgagccgaccctgttcactacccatgcgctggcaaagaagtatgcccagcagatagtgaaatacggtaaagcaaacgacgttttcccgccttttacgcctgttatcgagacccggcacaaggcagatatgaatcggttcactgttcacaacaaaatccccgaataggagacgtatctatgaaactttctgaaattttccaaaaaggcctgaactatgcaattgagtacggaatgccgtggtatatgtgcatccgtctccgggagattcatttgttcccctcgcccgttgaaatggcagttaactcggtcatgatgtctgccggtatctcatcaaccccagagggatgcgaattcgccggcgttgatgactatttcgaggaaagcggcctagcagccgcatacaaaatgaacaatcaggaaatgtccgaatacgggcgctcatcctacgcaatgtgggtgcaattttggttcttcgtaatctttgacttagcccgaaaagggcagtagaatgcattacaagcgtagaacagccagcaaataatgtgatctagagggacggtcatgggtgacaaaactgtagtttatcgggtggagtgcaggaacggcgagggaccgtatgttaactatggtatggagattgatacgtcctccactcccgagcggcccgtaccggagcatgacgggatacctgatgttcgccattttgagtatttcgccttcacgtctcctaaacaactagatgactggttcggggactactacagcaatctgaccgagcactccagcgcctcaatcaaaatgtatgaggtggacaggcagcatgtaaggactggtctccggcagtgtgtattccgcagagatgcggcggtttgcgtcaaggaaatgactattgaccaatgggtaggcctgcttaaggctggcatgatctctgcggtagtcgtacaagctctggccccgatcccagccgaacaactatccctagacctaggggacgatccggcctgtgaggctcagaaagaaattttgaaaatgttcagtttatagggttgacagcttgggccattcgcgtagaatggccctcaagcaagacaaaccacaaacccggagactcaccatgaacaagccaatgaatactttcgcatacgcccactacgtcgcccgcatggacaaggcctctggcactagcctgccctacgccaccctgttccgcatcgccctgcgtaacgcctaccgcaagccgggtgtccgccagtacgattgtgcagcactcgtcgaggatatcaaagcgcgtgaactggtccaaaagcgcattcgggctgaaaaagcagtagtgatggcggcagtaatgcgtgcaattcgtaccggcttcaccgttagcgtgaaagatggcagcgatggcgagtgggtagtgaaaaagtctaccgatatcaaggaaatctctgatagcctgcaatctaccgacgaggatatcatccgcttccgcaagggcgacggcccggacaacatcgtcggctctatgtgggcaatctacggtaacagcgccggcgaagtgatcgccgactggactgataatgccaccatggccatgattatggctccggctgagcggaagatggaaaaatacgctgaattaggtatctaatgcttgacggggcccgaaaagggccccataatgcacccataccagcaaacaacatcaggaccgccccgatgagccagatcaaaatccaagagtatatcgtagccgagatcaaggttaaccattgcgctcacctgcgcaagggccagaccatccaagcccgcgatgctcgtagcagtgaaaagtggattgcattcatggtggaacgcgggtatagtgcctctgaagccgctatcctgttcaaagatgcacatgatgtggcaatgctcgaactggcagcctgaaaaaatcctactaggagtactgacaaatgaaacgccaatatactgattcctaccagtgcaaagcaatcgacggcctgatgtctatctgcggtggtaagaaagctatcgtacaagtgtggccgtccttgaaagcctctcgaaaccgccggctgaaaaagatggtaaaatacattgcccggtcaggatggaaaccgtaaccaactgattatcacagccccggcttgccggggctcacaataggagataaaagcatgaataccctgattatccgtttggattccgcctacagcgttcaaactgtccgtagtttccttatggaagctgtagagagtattcgaaagcatatccgggactacgcggttcatgacgaatacgattcgggattgagcccggtagcacccaatcatcgacttgcaatcgtcaccttagacgaagattgccgagtgtttcacattcaatgcgagtcacctgatctttatctggcgaaccctcggatcgtgtttactgatgttgaaagcccggcatataccactcccgtgaacgagatcgaagagtatagttacatgaccgcatggcagcatatacgtcaaaaagatatgacagcaaaagactacctgtcggattggtctatccttttcgcctcaaaggagaatgccattgatatcgacctgcgccccaatctgaaaacgcaaatcttgcattaactgagggagctaggatgaagcttcgaaccatattcgaaacctacgattgccgagttaggtttgtcaccataaccggcgtgtttgtggaatctcaaattgtgcggagtttcggtcaagctcaggagattgtatcactcctctgcaatcccgcagatactggtatccgtctatccttcttcgacgaagaggagggctgcgagtcgatcctctgccgattcaactacaaaggagaaatcatcaaatgaataacaagtataaggataacatcattgcggaatactgccatttcgacggcagacggccagtcctttccttggcggcacgatgggtccaccacgacagtcgagttgtgaagctggcagcgctctttgcctgtgctggctatggccgtccttacaaagattgtattaaggcctacaaggacgccaagcagcgggaaaaggatatgcgaaaccctgccaaatggaagctgagccgagcgactaagcgggctctacgggctcgactagtggctatagaaaaactagaataatccggaaaatacctgttgacgtgaggctagagggttccctatactgtgcctatcgagacgcacaaggcgtctcctaagctagaaggactagcaaaatggcaaaggcaaatctgaagttctcccgcattggcaatgacggctacgactacgcccgcagggaagacggggtttggtttgtcagagaagggtactacgggcggtacggctgggctaaaaccaaatggactcaagttcaacccggggatggcatgactatagtcgatgcctgcctgaaggctcacgaagctggaagctccagcacatacatcggattcgggaatctggtggtattttccgacgggaaggggctccgtttaccctgaacaggaactcaaataaagttgttgacagcttaggccattcctgtagaatggccctcaagcaaagggaatcaccctgagcacctgaataggtaaaagacgatgcaagcaacctaccaagccctgaaaactctgcgcgatgcttgtgaagctgtcaaggatgaaaaaggcaccatcaacggaaacaaattgaatgcactgcgtaacaaggctgtcaaggaaatgcaagctggtggtgaaacctactctgacgccattagcatggctcacgacttgattaagaagtatcgcaagtaatcaatccgtaacaagccccgggtgaccggggcctctcataggagagaccatgaaaaacgttcaaatctgttgttcgaagtgtggagccatcaacggcggtaacagcaaacacaattgggttatcgcattaggcaagaagtggtgcggtcattgtgggtccaatctcacaacccttcgtcgctaaccattcactgagacctaatcgaggagagatcatgaacgccactctggcacgcctacagaacgaacgctgtgcaaccctccgcctgatgctgctgccggaacatcgtgggtatcagttctctggccatccttgggccgagcgcatccgcaatctccacgatgaagccaagtgcatccgcagccatcactaaaccgcactaatccattaaaactctaacagcccgccttgtgcgggctttgttctatctgcgaaagcgacagctttcaagtgtaattaacatgtaatgttgtaacactctgtagaggtaacaccagcatgacaagatagaccacttgtaacgttgacgttacatgtataacagcatgacagcgaaagctgtacagatagcattctgtccagttcacccctatcaaataaccccacaataacccacctaaaacctatcggttttaagcggcctgtaaggccgtatatgaagcgatagcttcgctatgttagtctgcaccatcaaggcgagagccttacagcatgaggcttgtaggaggttttaaggccatatgcgattagcataggatgttggttgttttaggtagatttttggtataacccctttcagcgctaccattgtcccggtgatgttaagcgacagcttacatccgctcccattttgcaatggaaattgcatacagttcatcatgcgcttcaaaagtgacttcactttgcatgcggatgcatgctatagtataccctgtgatagctccgctatcccgttttgcatggcacacgaattgcataagcatgacaagggtaaccctcgaaagcggagctttcaaagtgtaggctgagtgtgggctctacctctattatatttgcgaccggaagtagtgacactgaaaacgttgactctagcccagtaaatacgttaaactaaaaggttgatagctgccgctatcgagtaaccaacattcacacaaggaggcacaatgacaagcaacaatcatgccaagattcacatccattacgctaagcaaatctactacgccatgcgtaaacgtgccatcgcaagcgatgagatatgcaaggaatgggccaagcccaagacaggctttgaagcgttctatgattgggtggtgaatgtgtcagggtacgccgtaggctaccgcctagacaggaatatcctcttcccgggaaacaagctctatgctccgcatacatgtgagttcacacctacatacatgcatactctattcaccaactgcgacaagacaagcaataaccgtgccaacaatgatctacctctaggcgtccgcctagcccgtcatgacaagtacggaatgccagtatacgtctcacagtgcaggacactaggcaagcagtctacccttggatcgttcgacgatccgatgcaagcccatgcggcatggcaacatgccaaggtagcagccatcctcgaatgtattgatctctatcagatggaggatgttcacagtgtaaacgttgttcaagcgttgcttgaaagagtggacaaacttggcaaggatattgcacagggaaaagagacaacccttttgcaatgatttgatggggtcgatggtcaaccctctgagagtgcgagaactccgccagagtaatccgatagcgaagctatcaaacgtatatgcatattccatgccaacatgtggaaagatttcacccggcagggcgggagcccgttggcattagttttgcatagcttagctgtcgctaagaaggaaagaccacggccacccattattttggatttactaaggg

SEQ ID NO: 67 - DNA, 46794 bp, synthetic construct
  source 1..46794: mol_type = other DNA
ccccaggagtcccccagataaagtgggggtggcctatccacaggggtatagcccctagcccctccctaggataccatgggattagtccgggggtcaacccttagacccttgggctaagccccctagagctaccgttcatcgggtggacactagggtattcataagaaaaatcttagggtattcaggaggtggatcggggggaatatcccttgataaccccttgaccccctattgacttccctcgataccatatgttaatcaaagactgtctatatccgggggtttgctgaagactgatagtccatagactgtataaaaaaccagtagacaaccccgtaaggaatatggcctaatggctccgccttgaaggaaaccgacaggcaacgggggaaacccctaggggcttgacaaaccccgcggaacctggcctaatggccaccacgttccacctaggccaccatcctccaagtctacggacattaacgggggctgccaaccaaaggggaatgcccaagtcacccaagtataagaccggcaggcatcgggggttgacaagggataggggaagcggtaagatggctcccaagtcaacggcataacgtgcatgactccctcgggattagcgtagccttgacaagcaagactgatggccactcagaaaaagagcctatgccggagaaccggacgaactaacccccgtcagagggttgacaagccaagcccgaggctctaacatgggcacccattaggtgacggccaccttgggaaagtgtaccttcgacggtccttggactgaacaagggagaaacccgaaagctgggggaataacgcacactccggaagagcgtaggttctggccttgtaccatagaaggtccgactggttgcctgctccagcgtaaacaattagcagagttcccggtagaatcgtggggaacagtatgatgggttagtatcgtcggcttagcaacgagggcgaagcgtggtagatactggcgaaggtaggggcgagggattcgaagacccccgaggatagccagaggacagaccacaacgaggatactaacgcggaaaggggccggctacgccaatgccaaggtttgccgactaacccctttatcgtatcgtagtgtgtgctacggctgatgattccaaaaggatgaaacgatgaacgctgctctggataagaagctgcgccgcaaggctagccgcaaggctcgtgctcaaggtctgaacattgggcatcttggcaaagctcagcagcgtgcagaacagaagttcgggatcatttccaattgtaacaagatcctggatagtaagtttgcttccctacaggaaaaggccggggcacgcaagcgcaaggctctgatgaataccgattggcgtaaccgtgaggatactaaactgcgcaattggtacaagcctagcaagtgcaagaactcccccgtcacccacatcaaacccgaggtataagttatgagcgactacaagcgcatcaacggcatcatcaagaccatcgcccagcgtggtgcgtccctggataagctgatccaaaccaccggcctggatatcctcaagcatatcgaagagcacggcgaggtttcgctggcatgcaagctgttcaaggccatgccccaggggtcccgtcgcaacgccctggccgcgtggttcatcgaccacggcaagatcgaggccaatatcgacaaggaaaagtccaaggaattcccgttcgtcatcgccaaggataaggccactcgactggagcgtgcagccgaaaagccctggttcaagtacaagaaagagcgtgacgtggccgacgagttctccctcgatcaagccatcgccgccttcaaggccaaaatccaacgtgccatcgacaagggccagctccaggcagctgacgagcgtatcgccgtgatccaacgtctggaagtgaaggacgaagcgaaggcagcctaacggccagggccaggggtgtgtactatgacgcgccccttggttcctccctagagtacatggtaggtccgtgtattgtatggatgaactaaccgaggataaaaccgtgtggaccccttttggtagctttctggtagctgttacaaacgattacgtgcaaggacgttgtaactcccgttcgtataacagcgatgggtctgagcaggtagtgtaccgttgggctttcgtcgatggtaagttcgcctgcggtgtatatgtagatggccgtcccatgggcttctgtgggtggaccaaatgaagtccacctacgaagctgcccacgaacgtgccctcatggttaatcggctacagaagctaaccagaatgcttcgtgtccaccacgaccctaagtggaaacaggaacaacaggaacttatcaagaggttaaggcgatgattatctctatcgtggtgtcttgcgtaggcatcgggtacttcttcttccgtgactggaaggaggagatgggtatcaactgacccaactgatgaggccatggtgattcctggcggctaaggatttaaggtaaggaggtttatttatgcaccccttcgatcaagcggtcgtgaaggatccgaccgcgtcctacgtggacgtcaaggcgcggcggacgttcctgcagagcggccaactggacgatcgcctcaaggcggcgctgccgaaagaatatgactgcaccaccgaagcgacccccaatccgcagcaaggggaaatggtcatcccgcggcgctatctgtcggggaaccatggcccggtcaatccggattacgagccggtggtgaccctctaccgcgacttcgagaagatcagcgcgacgctgggcaacctctacgtggcgaccggcaaacccgtctatgccacctgcctgctgaatatgctcgacaaatgggccaaagcggatgccctgctcaattatgatccgaaaagccaaagctggtatcaggtcgagtggtcggcggcgaccgcggcgttcgccctgagcacgatgatggcggaacccaacgtcgacaccgcccaacgcgaacgggtcgtgaagtggctcaaccgggtcgcgcggcaccaaacgtcgttcccgggcggggacacgtcgtgctgcaacaatcacagctattggcgggggcaagaggcgacgatcatcggcgtgatctccaaagacgatgaactgttccgctgggggctcggccggtatgtccaagccatggggctgatcaacgaggatggcagcttcgtccatgaaatgacgcgccacgagcagtcgctccattatcaaaactatgccatgctccccctcacgatgatcgccgagaccgcgtcgcgccagggcatcgacctctatgcgtacaaggaaaacgggcgggacatccatagcgcccgcaaattcgtcttcgccgccgtgaaaaatccggacctgatcaaaaaatacgcctccgaaccgcaggatacgcgggcgttcaagcccgggcggggcgacctcaattggatcgaatatcaacgggcccgcttcgggttcgcggatgagctgggcttcatgaccgtgcccatcttcgatccgcggaccggcgggtcgggcacgctgctggcgtataaaccccaaggcgcggccgcccaggcccccgtcagctgaacgagaggtttaagatcttgggaaatcagcaaaggaaaccatcccgtgaaacgcaacgactatcgtaaggtcagccgcaacatgcaagccatcgaggctatcgaccgcaagattgccaaggtaactcgtgagttgaccaactccagcggcaatcaccttggtaaaaccctggagttgaacaaactccgtgccaagcgtgcatcgctggctaagaacagggcgcggtaatgtcatggaagtatattgcatgtgccgccatacgctcacgttccaatgggttgttgctggtagcgtgggtggttctcttcgtcctgtcctcgaccttggacagcatcccttttgcatcgtgaggtaatccgatgaagattaatgtggtagaaaagcccaagaaggttccggcgcataccctcaaggctacagatgttttccgtgttgagaacatccatgggatggtacttcgggatgaccacaaccactacctccccaatgacggcgatgtgtacttcgtttgcctggaggctggtatcatttgcagcatccatagcgactgcgaggtcatcccggtggacgctcaaatgaccgtgagggtctagtgtactatgacgcccgccctgtatctgctcctctggttggaatccttggtcagtatccgcaggttccagcctaaccacaaggcgtaccctggttggtacgtcacccatatccgtgtgtctatcttcggcaaacgtgtaggtatcgtctatgaaatccactaaaccgcaagtcttctggttggtaagcaaggatggtgagcgtcacgtaaaggtcatcaatttcggccagttcatcaccgaaaccctttacgaactcggcattccggtggaccacatcgttcatcgggttcagtaaggtgacgccatgaccaatacctctttcaccgtagcagtggcaaagccaaggtttgagttccacatcagcaagatggcggacggtgcctacgtccattcgggtgattccgggtctgtcgacttggtttacctcaagaaaggcgaactcgtgaccattattcacaaggatggtttcaacatcctcaagtgcaaggaaatcggtactcaccctgatctattcccggccaagtggttgtcggtgaatgcctgcatgtgggggccgtatgaagaataaacccatgataggccagataatggcccaggagcgccgcatgaagcgtcgggtagaaaagcgggggttcaacatgagcctccaggaaggcacccaggagccccgtggtgagcttggtttcaccttggctgccgtaggtatggagtcgagccgatcggcttaccttcggcacgccagggaggccatgatccaatctggtgagccttgccctcattgtatgccaatcttcggtcccaaagagggccgttgctgcaactgcgcgagggactggtgatgggccggtcgaaacacctcacgttcctcccgtcgaggatcactgtccttgacgatgatacggtctatgtgccttggcgataccagttggaatccctctacaacatggcttccgctggtggtgctactgaccccgaggcagtcaagggtgaattccttgattgggtacgagcggagtatgggcgatatgtgtccatcgagcttgaaggaatacccgaggacagggaagatgccttcgatgagtatgtattgaaggggtctcagcaagggtaagcaaaatgatgacatacctcctgataatcccagcgatcctgatctacatggccttctccttgctcgtggctggcatcgccgggctggcggcaaactgcgatgagtacgggaggatgagccagaaggaccaggacgtttcaatcatcctcggtatcctgtggccagtgtcactgccctggatgtgcttcatgtgtgttatctggaaccctttggctaccaccatccgtgcggccaaacgactaatcaaaggagattactaatgcgccgtatagacttcccttcctgctgcaccgccaagatttacattggcatgggcccctcgggtaccgctgaccaccgagccggggaagcgtccaatgggttcagcccccgtggtttcgccaaggaattgatcggggtcatccgtcgcgagtacaacgaaggtcatggcaccgccgtgttctccgtgaacaacgagcaggtggtagccgataccatcctccgcagaatgggcagccactacaacccctgggcctccagctacaaccactcgacgaaggttcgggttcacgtcatcaacgtgcaagctgcggcagaaatcctcatcaaccacggtgtcctcatccgacgactcggtggtttgcaggactaccccggtactgtcgagcactcggaatacctcgacaagctctgcaaaggtctgtaacatctaggccttgacattctgctgaaagtgtggtataataaccttaaggtgtccggggttgctttatatccctaggataccttaaggttctaaccttctatcttcttcatcttaagaaagaggtaagaacaatggtcctcaagctctacactcgggtaatgctcctggctatccccgcatggataagcatcctctgggtagtaccacagatgctgtccccggctgacaccatggtaaacgccattggtgctgccctcctggtaatctccatcctgtactccctctgggctgtcagtcacctgtactcctacgcaagtaagctctctggaaagaaggaggtgcatcgtggccacggtaacgagaagcagtaaggtcccaaccagccccctttacttcgaacgtaagtgtgattcccagatttaccttcgttcggaatcccggaaggacctcaccatcccgatggtaaacatctgcaatgggagtgtcctgtacctacaccctcgggaactccccgtgtatttcgtggcgatacccgagggtgaaactctcaaggtgaaggtgtgatgtactatgacggaacagcagcgagaccgcctccgtaaggcaatccacatggatctagaaggtatcggcgaagatacccccgacctctacgacaacatacataagatagaaggcctgcttggccacccaggtaagcccccgcatgattggggcttctatgtactgatgttcgtcatgttcatttccttgtgcatggtctacatcactccccttctctacaagtaaggaatccctatgaagaaaatcctcggcctcctggccattgctgccatcgctatcaccgcaggttgctccaaggttcccgctggctataccggtgtcgtcgtcaacatgatgggcgactctaagggcgtcgatctgaaggaaaccccggtcggctggaagttcctgacccccaacgaggagttgttcaagttccccaccttcaaccagaacttcgatctggcggtggttactgcccaggacaaggacggcctgaagttggacttccccatcggcgtcaccctccgggctgctcctggtagcgcacccctgctgttccagacctaccgcaagggtatgaacgagatcgtaagcgtgaacgtgccgcaggtggtccgtaacgccgtgaacaacgccagcagcaagaagtccgccgaggccatctatggtcctggcaaggaagcctttgtcaaggaagtcgaagctgccgtccgtgagcacttctccacccgtggcataatcgtcgaaagcctgtacctcaacggtatgatcggtctgccggcgcaggtggtcgaggcgatcaatgccaagatcaaggccactcagacggcgatgcagcgtgagaacgaactgcgtcagacccaggccgaggcagccaaggctatcgcggcagccgagggtgaaaagcaagcggctatcctggtggcacaaggtaaggccgaaagcctccgcatccagggtgaagccctccgccagaaccccggcgtggtagaactgaatgccatcgagaagtgggacggcaagctgcctacctacgtcaccggcggccaagccatgcccttcatcaacgttcgctaaggaggtggacaatgggtaagcgtaaggttttctatgagcgtatctgctccaacggtgaattgaccctgaacggcaacctcaaggccaccaaggtgtcggcacccaccaaaggcaagcagcagcgtcgcggccccttctaagagggcgttagtaatgcccctaggaactccctgggggtattgctggctaactcaatcaaggagaaaacaaatggcccgtatcaagtacgccttcggtatgaaatccaagaagggcggggttaaggccctcaaggtaatgacctctgcctcctgcttcggagccatggagggggtggtaacccatggttataagctcgacggttggaccttcgtctgctcccgtcgaagcaagaagttcatcgatgcacttaataagtgtacccaaggtgaactcaagaccatcaccatcggcggcaaggcctacaagatcccgaaggttcacttctggtcttacgaaagcaaggccaagacttccccgttcgtgaagtacgttagcgggtcggagttgatctctcccactcaacacgggaaggaaggggtttgcggtatctacttcaacccgaaggaacataccctagattcctggtatcccatcatgaagttcctcttcaagctggtatccagtggtctagaccctcaaggtcgagaggagaagattcacatggagcttgctgaaaagtatggcttctggaagtcctacctcgcaatgtctttccacggattggtagccaatggatacaccgggtaccccctcaccaattacatgttcagtaatgattgggaggatatcaagaaaggcgatatccacatccagtccgcagaagagtgcaaccgattcggccgttgggtgcccaaccgtaatgccccaggtggacgtgagtgggtaaggtccaagccctacaagtcagaatacctggggattaagctgaacaaggtggaggtggtaactatttacccccagccaaccatcttcggcaagaaaaccccctacgacatcgtggatacggaactgggaggattcctccggcttactccttctgactgtgaaaaacacggagtggtcatgctggggaccatgggtgaaattcactggggtcgcggctcaagggatatccccctggccctggaaggattcatagagaaaaacttctgacaaccaaggagaaatcaaatgggaatgtatgcagcccataacgtgtactacgatgccgagggtgctgaggttggtcactgctgcgttaaatacgtggctgaatacaccaactgcttcggtgcattctgcgactcaacggggccccacccggatatagtgtgggagaccggggttggacacctcctggtgtctacccacgagaacactgctggtaaactggtagaattcttgaatagtgatctggtcaacaggatcaccgacggtggaatcctctcggcttcccaggactggcccaccgagtggtggacgggatctggccgtaaacaaaacctctccaatcctgaccacttcagcccacctggccgccgacaggctgtgtacgttcgggtggacctcaagaagaacgcatcggcaatcatctgcgcactccgtatgggtgatcgtctctggggtatcggggatcagatgcgtcgtattccgaaggaagctcaggataaaatcctgggattcaacgcagaacttcttaccctcgcggcttgtgcccaggtcggtagcactgcccactgcgacagctatccggcgatgttccctgtgactgctggggagtataaggagcagtgtgaagccaatggggatgatgtagaggatagctacatcagcgaaatcatggaccacttgacgggtgggttgaaggatatcacctacttcgatatcaagagcatccatggacgaactcgcgaagagttcaaggacaagctcaagcaccacaatgacccactctggctgggttataccaaggatgattacctgatcgagtgtgatgggttggatggggtacacgatgatcgaatcctttccatcatggcgcccatcaccatcgacgtaggggaccccggacgggataattcccccacggtacccaccggttattacgaccttcccgaaatcctcgaaaaactggagagcatgcaatgaacaacgcaatccccctgatcggtgcagatcccgaagttttcgtcggctacgaccgtaacccccagagcgtcatcggcttcatcggtggaaccaaggaagcgcccttggctgtagccggtggtgccgtccaagaagataacgttcttctggagtacaacatcgacccggccagcaccaaggaagatttcgtcaagcggatcatttccgtccgactccttggtgcccagatgctccaccccttcggcatgaacatcatcgagaacctgtcgtctcacctgtacgacgaggaactcctccgcagcttcggcccccaggcttatgtcttcggttgcgagccggactacaactgctggacccgtcgccagaacgtgatgccgaacgatgcacctccgaccctgcgcactgctggcggccacgtccatatcggcttcggccacatcgagcgagtcaccaaggctaccacccgcgaggtcatgcagatgtgtgactacctcctgggcctggcctctgtccttctcgacggcgacacccagcgtaagaagctgtacggtaaggccggtgcgatgcgctacaagccctacggcggcgagtaccgtagcctgtccaacttctggatcttctccgtcaacctgaccgagtgggtctatgaaatggcggtacaagcctacacctcgaagcacctgctggaagagtacaagtccatcgtgtctggcgatgaagtccagcggatcatcaacgagaacgacggtgttgcggcggtcgctgctcttcaggccttgggggtgaagtatgaatgacctcaacaacaggcatcgtctggccggcgacttcaacatgtactacagttccaccttcgccttcttccgggtggacggggagcctcgggtagtctacgtggatgacactgaatccatcggggatgaccgccagttcgatggcttccgtctcctgggtaatatcttccgtcccgacggcggacaatactacggcggcgtagtgtacagcgaggtcgaaggtgtgcggcccccgagtgggtactatgacgtcttcggtggcggcgagcgagatacctacgtgtcgttcctcgtgaacaatcgtacccagcgcaagggtgttgacccccggaatgtcctcatcaaccacggccagcaggcagtaaccggtcagatgatgatccgtatcttcctccaagcggaagagatgatctccgacccggcacaccgtgacttcttcatcaaggacggggtagtcaactggaaaggtgtaaaggtagggcagatggtagacaaccggctgtccgtagatgaacaattcaagaaccaggaggacttgctatgtcggttattggcacgcagataggtttccgtaagaaccagatcaagaccccggagcaccacgaggaacttcctgcggttgcatccttcgggttcgaggttgaactggagggtctggaccagtggcccgaggttgatggctgggatatcaagaacgatggatctctccggaatggtatggagtacgtcttctctggtccggcttctggtgaacaggcgatcaatcgtgtggaagccttcgcgaatgccatggaacagaatcccccggcacccaccttccgctgctctacccacctgcacatggatatgcgggatgtgaactggaaggtttacgagcggactgtcctggcctacatggtattcgaggatgtattcttcgatcactgccaaccgtaccgccgggatagcaacttctgtatccccttcttcagcaacgactggttgtcccagaccttcggtcgccgcatcctggcacccgagggtgatcgagagaaggtcttgggccttacctcctggccgaaatactcggccttgaacctccaggtcacccacaacttcggctccatcgagttccgtggtgcccacgcgatgaccactcgctcggaaatggtcgggctgatgcagcggatgatgtgcctcaaggcgttcgcgattgcccacgaggaaacccccttgggtgagttcgttaaggtcctgtcggatgtgaaccttcgtgatatctttttcctcggcgtagcccctgactatgaaatgtctccgggtggccgggaaatgggtatcgcaagcgcatccctggccattgcaactatgggctttgttcgctccggggtagaccccctggaggatgaacagaaccgtcagcgtcgtctccgtgagcaggctcgtgaacaacagcgggcactggatcgtcggttgatggctgcccgaagcgtcctgggtagaatccgagagggtgcccctgagcgttacaacctggcgatcatcgaagggagtaacatgcggatggatcaggtgcttaccactgtccagtccctgaggatgatcgggcaccaagtaagcgtccgagacctcgtagaggataacgagattcttcgtgattccttcgtacttctgctggacaacccggaccatatgcagcgtcaagctggattccgactcgaagaaaacatgtactaaggagataaacaatgtgtggattggtaggcttctgtgccacaactaacgcgagtgataacgaaatcgctcttctcaaatccctcctggccgtggatattatccgtggtgcccacgccactggtctggccaagatcgacccggttaagaacgaggtaggaattcacaagcgggcagtagatgcctacgacttcctggctgatcctgaaaccaaggagttcctggacaagggtcgggctcgcatctacatgggacataaccgttacgccaccatgggtgacaagacggaccatgcgaatgcccaccccttccaggtcgaccacatcaccatggtacataacgggactgtggattcctggggtctccatctgctggacggcaatgacaagtacaacgtggactccaacatgctgtgcgctaccattgccaaccacggagccaagaagaccttcgaagagaagttctccggtgctgctgcggtaatctggtgggactccaaggaacgtaccctgaacttcatccgcaacgatgagcgtccgttgttcatggcggtgaccaccactggtaccatcgtgtgggcatccgagcctggtatgctcaaggttttcctggagcgtcccaacgctaagatccgccttcgttctcccatcgctgaactgaaggctgaagtcctggtaactatcccgttcacggaggccggagtgcgaaagggtgtagaaccccagaccactccggttacatttctcgaccttcccatccccgaaagcgaaaggcaagcagcggcatggtggagtcgctacgtcggtgtctccgactacgaggactatagccgaagccaaggcagccaagcgggaacgaaaggcagcaaagcgggctcgtcgtatggaacgtctggcgatgcgtacgcaaggaacaccctccggatcaacaacaacctcgatgcagcaggcagcaccttcaagcaccgccaactcgtcaccttcgatgttgtcaaagtcgaggcctacgcaaacggcagcgaatacggaactgtcactggaatcgagcgtgaagaaaaccttctcatcgaagctcatggcatcaatgtcgccaaagtccacggctacaccgtcctccgaggaagtatctccaacgcctacttcatcggccaagaccgtgatctcaaggttactgtcgaggatctggcggtaagctgcctggacccaaagcatcggccgactcctggggagactaccccggttttgaggattggaacgatctcatcggagacgaaatcccattctaaacccagggttcaagtcggcggcaccttggggaatacccctccggccaacatcagctaccccttgaaggttcagggacacacgttcaacaacgttcatgtctttcgggacttcgtatcccaggggtgtgcatcctgcggtaagatccctaccgcgtatgaccagcgtaatcgtcatctgacggtgtacgagggtgccaagttcacaggtagcctggatgagtgtgagttcatctgcggcgaatgcgtaatcgaaaataaataggaggtcaaaatgacccaagtaactctcaagcgtcaagtagtgatccagatggaaaccgacgcaactcgtaagtatcctttctcccgcgacaccctggacaagatccagtcgatccgtcgagtcaaggagcaggaactcaatgatgccaacccggacgaggaattcctggtaccggccccggtagtcattgccgaggccatcgatcgactcttcgaagattacttcgagtaaagtagtgcgttagtaatagcccctggccgacccatgccggttcctaagctgcgtacatggggttcaacttaggatcacaggggctattgctggcttcactactaccctcaacagaaacaggagatatgccatgttctacatctacaaaggttcccgagcgtcttccggtgccgtaaatcttcgcaatgccctgggtgcccgaatccttcggtccgaggggtctacctaccgtggccgtgcgggtactgcggtaatcaactggggtaccgtaggtgcagaggcacgacgcctccagggtatcgccccggtattcctaaatgatccggccatggttgctcgctgcaccaacaagctggacttcttccgccacttcgaggccaatgcccctcacttgattccccgttggaccgagcgctgggaagatgccttgggtgtactaaatatctctggtcgcatgtatgcacgtaccgatctgaacggccatagcggtcgtggtatccatctggtgtgtactgtcaatgatgcagaagttgctgcaatcgatgccctccgtagacagggacactacccggtacacatctacggtcacacccacatcccggatgttatcaccagggcacaactgttcacccagggaatcgtcggtaagcgtaccgagtttcgagcccatgtgatccgtggggaggtagccctgctccaggtcaagctccgccgtactgccaacgatacggtgaccaacgaaggccaaagcatcgtccgtaacgtagccggtggctgggtctatggcgtcaacgatgcaatgggacgggatggcgctgagcaggctatgtcggcagcagcagaagctatccaagttgcaggcctggacttcggagctgtggatattatctaccagcacgctactagccgggcgtttgtcctggaaatcaacaccgcgccgggcctggatgcagaaggcagcgccctggaggcctacgtcaagggcttcaacaaaatcttcgaggagactatctaatggctgttcgtgttttcgtttatggtactctcctgtctggtttgtacaaccactaccttctggaaggggccgagtttgtcggcaatgctgtatcctgcgagcggggtctgatgtactccgctggcggattccccatcctctcctttgcctcccgcgctgacctcatcgtaggtgaaatctggcaactccccgagggcgaagcgggggatgaaatgctggagaacctggatgccctggagggttatccgggttggtatgatcgtaccctcaaggatttccgaatcaatggggaacgaatcaaagccctggtgtaccatcaggatagccatatggcgatggatatcgtcaaggatggcgactggaaggcacacctggcaaaacgacaaggagcagtataatgaacgaaatgaccgtagacaaagcagtagaagtctaccgcgataccccgaacaccttcggacaccaagagctacatgcccagaagatgctcctcaaggaaatcctgggacttgtagcttcccagcgacacctccaagactctatcgaggtctccaagattccggaggcctcggatagtcccgagaccagctacggtgggtactgtgacgaatccattggaattcgcttcatgtgggagcgactgaagaaaatcgaggatcgtcttcgggaactggaggaggtctacggtaccttcgtaacaactccctataaaaccctaccgggcaacgtgaatgctgtaccaagcctggttctcaagagtcaactggaggggtaagtgaagaaaatcatcggtgatacggcttgtccgggttgccgagctaaaggtggggataaaacaggaaatcacctcatcttgttcgttgatacagaaaagggtactcggttcggaagttgtaaccgttgtggtcactacgaagtcctcgaagagggtttcaaggttcctgaacgaagggagaaatccgaggaggatatcatccatgaagtcaacgaagtccttgagtatccaattaaagccctcgatactcgaaagatcagcaaatcaatcgctgaacggtacggggtacgtgttggtctatcacaagaaaatggtgaggacgttatcgagcattactatccacgcacccgcgatggggagtaccgagcgtttaacgtccgaatcctagaacctaaggctttctactatcgtggtagccccaagggtggtgttgaccccttcggttataacacccttcggcataaggatatgggccacctgcggttagtcatctgcgaagatgaactgtcggctatgtctgtggcccagatcatggagtcgaaactcccggagaagtggaagcatcttcgtcaggcatccattagttggtcctcgggtgttggttctgctgggcgggatatcgcattccttaaggagtctggtgtccttgagcggttcaacgaggtcatctattgccacgatgctgatgacgaggggcgtaagtcagtagaaaaggtacgtgccctgtaccctgagtgtaagtttgtcgagctcccgctgaaggatgctaacgacatgctcatgcgtaatcggggggatgaggtataccagatgatccgattcggcagcaaggtgaagtctcctgactgctccgtgactgtcgatgaggtatatgctgaggctctggaaccccctaagtggggcaagagttatccgtgggagggcctaaccaaccttacctatggtcagcgtgatggtgaaatcatcggggtaggtggaggtactggtatcggtaagaccctgttggcccacgagattgctgcctggaattgcattgagcacggggagaacgtagggactttcctgttggaagagcaggtagccatgacacttaagaatatcgcggggaaggttgccaacgtgcccttccaccgaccggatatcgagtgggatgagcaagcctttaaagatgctgcgggtaaactccggggcaagctcttcatgtggaagaataagggtcagaacgattgggatcatatcaaggagtgtattcgcttctgggcagtagccatggatgtgaagactatcctactggataacatgaccgccatgaccaaccaccttagtccttccgaaatgaacacggagatcgctcgtatctgtacagagctcgcagggatggccgacgagctaggactgcggatcttcatcttctcccaccttaacccacccaagggtaaccgtacccacgaggagggtgctgaagtaaaggaaagccagttcactggttcccgagctatgcagcggtggtgtcagcttatgatcggattcgagcggaacaagcaggctgacggtgaagagaagcacgagagtcgaatccgtgtaatcaaggacaggaactacggtaacactggcctagtgttcaccaagtataaccctgagacgggtcgcttggttgagcgcgagggcagttacgacgaggtacctgctgacgatgacaccccaatttgattacgtgatctatgaccttgagggggacggactcttcaatgaggtcacaaggctatggtgcgctgttgcagtagacattccgactggggtagtccggggattccggcccgaggaaatggacgtgttctaccgcatcatcgcccatgcaaagttcgtggtcgggcataacatcctagactacgacaaccgggtccttgagaaacttcatgggatcatcatccctccggatcgaagctacgacaccttggttgcatcgaggttgacttggccagaccgaccccagggtcattccctgggtgcctggggtagattcctgaagtgtcacaagggtgatttcaacgacttctccaagttctccgaagaaatgtttgagtattgccttcaggatggagtggtcagtcacgcactgttcaactacctcctccgggtactcggcatgacttggcaagagcttgttgaatggaggactgtagattggctaaaaagcgagtgaggaactacaagcgtgaaagggagctggctattcgacgcggcgaaacgggcgttggctctaagtctggagatgctcagcggcaccgagcccgccgaaaggtggaaaagcgtcttggaaggaaactcggagccgacgaggttgtcgatcatatcaaacgtgttaaagatggtggcggtaacggggattctaatctccgcgtccgtagtcattcttctaacgctgctgatggtggtcgtgtgggcaatcgtaaggccaaaggcattcgtaagaaaaagtaactaaggaggggccttcgggcccccgaggactctctatgttcaatcgaaagcttagcatcagtaacatcctcaattccttcgataaggttctggtgaacctgaagaccttcatccaagagtcttcggaggaatctgagcgcatctacaacgagatcagcctgctcaaagctgagcgtacccaggtcatgcaggacaacctgaaggcccagaaggtactggctaacctggaagaattgctgggaggtaagagtgaagaagtatcgagttaacgttgggttccaggacaccaaggtgttcaacgcagacttctaccgcatcgagttggatatcatccggttcttcgcgggtgattccgatgccaaccccatgaccgtccgagccaatgagatcggtgctgtccgtggatgggtttctgtggaggagattaacgatggcgagtaagaaggaaagcctggaggatcaggcacggaaggagattgccctggagaaggagttctctggtagctggggtggccccgagatcgatgctgatgacttccccttgggtagtgcctgtggcctagatcccgaggtatgcgagtcatgccaatagctctacaagtccttgtcatcttctggagtgcattcttccaggtattcctcctgggattgaactctaagctccttcgggatgacaagatcaaggctgggtttgtagtgtcttggtgtatcacgctggctcagtttgcttacatcaaggccgtggggtcttcccacttggatatcggatggtttatcttcgtatccgggtggggaggtgcccttgggattacctctgcccaatacttctacaagtggtacgacagagtattccacaagaaggcttgacaaatccagaaaagtgtggtataataaccttaaggtgtccggggttgctttacccctataggagatacaaatgagtgaccatgtaagctattccaaacatgtccgtggtaagtacctgtgtaatatggcctctgccctccataagagcatggaggtacaaaggactaacatccgtaagttcctcagcagtccccacattaccctacgggagaagcgtcgggtgttcctgagcctgccagagggattcctgggggtgagctatttcacggggtctcacctgaacctgagttcctactcggatcgtcgaaacacccggattcgtgacaaggatatgagtctctatgatgacttctatgtggacaggggcacccaactagatcctcgggatgctttgtttgccaataaagaggcgaaggagtacgagtttcagtttctgaggaagaagtgggggactgacttcgagttgtctggtgaggatcttgagaacgtcaagggttgccagcgcatgatcgatctgtcctggtatctggtagacctggcctgtgaacgtgggtgttcctacttcgttttcgactggtgattacatgagcaagatcaagagtatcctcatggagcgggtagatgacttcctgctcaagcaagttgctgtggccttcctggagcagcaatggaagctggaccgcagtggtaccgtggactacctctcctacctggggggtgtatctcacgaagctgtggagacagttgtagagaatctagcggagcgtcttaagggggattaagtggattggagaaagtcactgttcgttgagcacaaggtagctgatatcatcagccgccagagtaaacgtggagtctacttccagactcagcgggccaagtggctgatccatgtgcttagcgaacgaatcctcaagattgaccttgaggctgtcccccagatgcccatgatgatcgtaagggctggggccttcagcaagccattcctaaagagtggtaagccgaaccaaaggctccagtccctgtggcaacgtcttgggcatttcgaggtatctggacccttctctgcaatcgagtatgtacccttcgaccttggtaagactgccaagttcaaggactggatgctggatcaggggtggatacctgaccaatggaacatcaaggatattactgtcggcactgatggcaagaagctacgtggatctgaccttaatgaatccttgaataagtacattgaggatctccgacagagcaagtctggacgactccgaatgaagctccaggggatcatccctgggaaaactaccattggggaagtcaagagaaagctcgaaaagcaacgtaaggtcctaacgactccgaagatgactgaagagtcgatggataccgtccagggagacctgggcaagctggtgatgcagcgaatggtttgggcccaccgtcggtccctcttgcaggggctggtagatcaggtgaggcctgatggacgcctagaggggagtgctaacccctgtgcaacacctacgggccgtatgaggcaccgtgtagtagtcaatatccccgctgctcgttctcctttcggacctgaaatccgtgggttgttccaggggacacctgaggctggtgaatggaaatggactgtcctccgccgtgatcttggggagaacgaaagggttaggcccttcactaacatcgtggaggaactcaagaagggtaagtggaagactgtaggaaagtaccgggtatacgtcccagcgaaccaattagtattcgtgggctacgatggtgctggtctagagcttcggatgcttgcatcctacatcaacaacccagagtacaccaaagaggtggtcgagggtgatgtacacacggccaaccagatagccgcagggcttcccacacgggacgatgctaagacgttcatctacgccttcatctacggtgctggggatgccaagattgggactatcattggtggtacaagggcggacggggctaagctccgggcccaattccttgaagctaacccagaccttgctgcactgattgagagggttaagcaggaagccgagaggggttatctcgaagggctagacggacggaagctaaccatgcgacgttctgagtctggcgacgtgatgatccacaaggcattgaacaccctcctacaagcagcaggtgcaattgtcatgaagtgggccatggtgctcctagacgagcgagtccgtaggttaaacctgagggcttggaaagtcttggatatccacgacgaaggtcagtgggaatgccacccagaggatctcaaggcgctacgtgagcagatggaagtctgtgtccgggatgctggggagatcctaggtgttaactgtcctttggctagcgattctatcgctggtcgctcatggaaagacacacattgatacatctgggggttgactttcagcccccttttgtggtataataccttcttccctacgagaggtttaagatatgtctaagaaagtttcccaacgattcaccttcccggtagcgaagctgatcttcccctacatcgtaactccggataccgagtacggtgaggtctaccaagtaaccatctgcattccgaccaaggaagaggccgacaagctggtacagcagatggaatctaaggatgttcgtctgaaggacaccatcaaataccaagagcgagacggcgagtacctgttcaaggttaagcagaagaagcacgtggactggatgcaggatggcgaacgtaagtctgccgtgatgaagcctgtagtcctgacctcggataacaagccgtatgacggccccaacccgtggggcggttcgactggcgaggtaggtatcctgatcgaaacccagaagggtccgcgaggcaagggtactatgacggccttgcgactgcgcggtgtacgtctccacgagattgtatccggtggtgatggcgaggatgatcctctgttcggtggtggttttgctgaagaagaggacaagtccgaggacgtattcgacgaggtattcgatgacgaagacgctcctatctaagggtctagcggatcatgagtcgggggtatgccggtcaggctgcccctactgcttaattgaattcgagaaagtgtggggtgtacgggtggtgagttctacagctgcatctaataataaagtagaggtcgatcctaatggaatcaaacctggtgagccgggcgctaagctcgatagcggcaaggtggatgttggaatcatcttcgaagcgttcccgagggctctatatgcagtggcacaagttgctaacttcggagccagcaaatatagtcgcgggggttggaggcatgtcgagaacggtatccagcgatatgacgctgccttcggaagacacctccttgagcgtcacaagggaaaaactttggacccccaaagtaaactaccccaccggtatcacgaagtgtggaacgccctagcgtccctggaactcgtcattcagcaagaggaggaatccaatggaacttctgttggacccaagggctaagactgttcctagcaactactctgtgatgggaatcgatgtagacctggggcttcccccaggctacagcctaacggaggaagctatggacaaagccaagcgtcaagagagcgagtattacgactggaaggggtatgaagcactggccaatccagtgatagagcacccagagtaccgagccaagggtgaagcctttgccctccgtgtcttctgggaagagaagctcaaagaatcccaggtcgtagaagaggtatcgtgatgattgaggagcggttctggtccaaggttgataaaaccgagggttgctggaactggacactaggtttcccatacaatgctgttcagaacatcagatatggcagggcgtgggctcaatgctgggagtagtccagcgtaaggagggtaagtagtatgatcgcaggaattgatggcgacgtactttagcttcgctacgaattgggacatgtggctatgtcgaaggaacacatcttcgatatccaggtggagaagccatggcctgaggaagaggtccataagctcgtcgatgataaagtcgaacaaattatcaaaagggtaaatgcagatgagtgtgaaatctaccttactggccaaggaaattttaggctggagcttgcgaaaatcaagcaatataagggtactcgaatcggtcttgaaaagcctcatcactgggaaaccgtgtcggcccgacttaaggacaagtggggagcaatcactttccacggtatcgaggctgatgactggctcggaattcgagggactgaagagggagataactttacagcgtgttctagagacaaggatatccgccaagtcccaggatgctaccattacagttggccctgtggagattcccagccggagttgggaccatttcaagttgatggtcttggaacagtctccgcttcttggcgaatgtatggtgttaagaaaccgcagaagtcatggaagcttgagggcaacggtacggcattcctctacgggcaactccttgttggtgactccgtggataacataccaggcctcccagggacgggaccaaagacagcggcagatttgcttggggagctttctaatgagagggatctcttcgcagcttgcgcttacgcctaccaacagaagtacggagataattggaaggagtaccttgtggaaaactttcgtctcctctacctcattcgcgaccgctcttggcttgatattcagcagtccggtaacgagtatcactgctcactgaagaaacattgggagatcccctatgacgacgaagatttattctattgatgaggccctatctatctgtgagggtctcttcaaaatcctggagactactggcttcactgactacaaggtggctggtggtttcctccgggatgcagacaacggggtagcacccaaggatattgacctatatgtacgcaggcctcgtgtagaagccattggtagacgagtctcacgtgtctttgggccccagatggttccttgcagtgatgatgagcttgaggtagaagtcatccggttctacaacaaacttggtcacaagaaggttcgtacggggtccggggaattacgcaatgggtatcccgaggggttttctgtgtgggagtccattggtgttgatctcccggttaacctggtcgtatccactgacagtcacccagcagagttcgacatggggatctgtgaaatctcctgttggcctattggcacccttcgtcgtaaccgtagtggagaaatctaccggtccagggcatacgagtgggacaaggagaataagtgcatcacaatcaatcgtatggttgatccgttgctggagagtggcaatgagataaccgttggccagatcgagagactcgttaatcacgtatcgagggtaaaggctaagtacccagaccaccgagtgtgcattggggattggatttggatgcttcttcgttcacgttcagtctacgcagggagcgcaatggattttatagtaaggcttcaagaggagggtctaattggcaaagcaggggagattcttcagaaccaaactgaagtcattgattgggacgaagtacgacagcgaaaccgagaagatcgtccacgagacgatgccttggatgcagttcaagccgtccccggtaccatacgtcatcgagcacaagtacaagccggacttcaaggtatcgacattacaaccttgtggatcgacgaagaatctgttggtcgaggtcaaggggtacttccaagaggcgtctgaggcatccaagtatatctgggtgagggaggcccttcccccggatactgaacttgtgttcatctttgagcggcctaatacggcctgccattggcttagtaagcgtaaggatggcacaaagcaatccatggcggaatgggccgaacgtaacggcttccgctggtttactctagagactttcaaggagtccttccctaatgagtaagaagtacaatgaagacactctcgttatcgcggacactcaagttcgatccgaggttaacatcgaccacattggtaacctcggggagtggatcgcacgtaaccgccccaagcgaattgttcatattggggaccattgggacatgcccagcctgtctagctacgaccgtggtaccgctaagatcgaaggccgacgagtcctcgctgatatccaagctggtaatgatgcgatgcgagtcctgctcgatcctcttcgtcgcctacagcagcatcaggcgagttgtaagaaaagggtctaccgaccagaaatgcacttcttcatcggtaaccacgaggagcgtatcaagcggtatgaaaactctaaccctgctctccaaggttttattgggtacgatcattttgatctgtccgattggattgtccatgatttcctcgacgtgggtgttatcgaaggtgtcgccttcgcccactacttctacaatcccaacagtggtcggccatacggcgggagtgccgagcatcgcctcaataagatcaagcgcagcttcgtccaaggccatgagcagggattcaagtaccacatcgaggcagtaggaaagaagcgaatccacggattggtagtcggtagcttctatacccacgatgaatcctacaagggtcctcagggtaacgaccattggcgaggtgtagcccttctccggaaccacaaggacggggaatatgacctcaagctgatgagcgtggaggagttcctgtgagtaagttcttgccagacctgtactacattaagtctgagcatgacttcggtcaacgggggttggcgtttaagacgccgatctccgcagaactctggctggacatgaagtttgggaaagggggtgcagaggaggggcttaagcgagggatgtattccatcgaagtcctggagatcctctacatcccaagcgttcaccttccagatatcttggggtaatctatgaaagaccgagtgggacgtaagctagaggtaggggacagtgtagtcttcctggtccacaggaacacctcctcccatctagctattggtacagttgatgggtttactccgaagatgattcggatcaaatgtcctaccatgagttggactattgattctgaatatgtcctcaggagcagtgacaaggtggtgtactatgacaaaggctgaactggagaaagcacttgaagagacgcaaagcgctcttgcgaaggctgaggcgaaggccttttcctttgaagaactggctgaagaagctaaaagacagattgaattcctcgaagggatgctagacctagtagacctcagggcttctgtattctacggagattggaggggttatgcagaaagatcaaaagggtaagggtggattcccttggacctacattgcggtagcagccttgtttgccctgctggtttatgtagggtatagctgactgatgttactcctgaccctgggagaaatatctaggttactaatcgaagtgttatcttgggcaggttccttatgaagtatcgagtgcagcagctagggaagcgtctcttctacatacaaaagaggtttctctttatgtggaggactgttacggactcgggaggttgttttatggccttctactccttggaagatgctgaggagttcatccgggataacctaaagtatagggattctccagtctaccaccccgtcgagtaaccaaaaaaaaggccccaagggtatcatcccaaggggccttatctttagctccggagagcgttcagcagagtgttgaacttatccacgagggcctcgtgagtgtccgtataggaagccacggggatctcagatatcttatcctggatggaagccgcaatggcttcatataggccactcacttcgctagccttaggcttccagttacctggtttagcctcactagccttagcacccacctccagaagcttaggcttcccctcaatatcctcccacttcactggctcaaagtctttcgggccaatgacttgtcggagggtcccatcctcattacgaacagcaatagccttcgattgaataacgaatacactgttgccgtcgttgtcagcgatataacctgccataattaactcctaattaagctgctgatttgaaggtacccacggtaccaccgaagggatatacacggatagtgcattccccgaattgaccatcagtctccgtctggttacccttagcataccaagccttgtccggagatacagcaaacttgatcttagctgccgatccctggataaagtggaagtgacaacctggggttacatcggggcccagggtgacggtaatctccgtagtcccctgagacatgaagaaccatccagactgttgcttagtcagggtaatattctgagtaagctgctgggtattgacgacgttaccacccaggtgagtagtcacaaggcggggatcaaggtagttctgttggagagaaccaatgttctgcacaggaccacgcatgtcgtcaaactgctcgataatgtagtcaccaatggtaccaccattttggtcatctggaccaatcacgtgcttgatagccacataaacatccaggtgttcccgacgggggtctactcggaattcactaccgaaagcagtaccacaaggggcctcaatcatagtctcagagaacaggccaatcacgtggccagggtcacggttaccacccgaggtttcaccaggagcacccacaagggtgttgaccaggacagaggggataacggcctctgaggggttctccgggaaggaggctgtaacgttctctactaccagggctgcgttctccttaactgcataatagtcagggaggaactctgtagcggtaacgatgttagtatttacccgaccggcatccgaggtaatctcaatgagatcaccatcggcattacgtcggaagacttttggcacatcaaccacgtaggcacggccaccaggaccagcggcatcagtttctacataagttgccatattacttctccttaaagatccagagcatcttccatcgcttccataccggcaacgaaaggacgtgctggagtttgcttatacaagaacttccagatttcacctgcggaagggtcatccccgaacgaggcaatagttttaccaacagccatagcaccctcagttgcagcaccagctactggacccaatagtacctctgcgggggtagtccctcggcggtaacccgtaagcatgtcgtagatcatagaggcctggagtggcatctgttgcatcactacgtccatcatccgttgttctggactacgggtatcctctcggctagacccaccgaacttagccagttgacgaagctcatcctggagatacccaagactcatcatcagaccaagagtgaaggctacacctgcggcacccataccagcgttggtccaagaaccagcgaagtgtgggctcattcgtctacggaacatcggtaggatgatgttaccataggctgctggataacccttcaagagggagaacatctgaacgtttccattgctcatccacataggcttatcagcgaaggttgggtcgaggactacctgatccacaaatcgacgcatagccagagtcttgacgttgttagccatcaagacttcagatggtgtagctggggagaccaacttgagggcatcctgctggataccgatgttaacccccatttcccgaagctgagcaaccttcagagcaccattagcagaactgaaggggaggcctgcggctagatccatcaggttattctgatagacccgcttggcagtctctgttgcaaacacccggttaacatgggttagaatggacaagccgttgatgaggaactgaccacggattgccttttggacagtcgtgttaaatacctcagcaccaacccgatcggccatcaaagaggtagcagaggacagggtgtggttcatatcactcataaacctaccggtctcagattttggaaccccactgtagatcctacgggctgcctgtcttactacctcccccatagttggcaatacagccccaagggtaggcatcacccctgccttagcgaatggtaggctgaactcagttagggtagagaaccctgcgaggggtagtcgggagagcacgagggcacctgacgtaacagccgccagcttcttaaggttggggtctttgatacgaccgtgcataccattgtaggcatccactaggtcatacatccgatccacttcttccttagtgactctcttaccagcccgttgagcctcagctacagcagaagcaatcttagcgttagccttctccccattgataccaaacctctcggtaaaggcaatccggtgggaagccccctcgaagtaatctcgaatttcctggagacgcttcttaggagtatcgttgagagaatacttgttgaggatctcttgaggcacggagccaaaggcccgactctcttccagctgaccatacttaggtactgcatcactctgggcaaaccgtccacgtagagtatctggatcaccttggatacgatatcgagggtctacttcccaagccccggtctgctggttctgagtaaccagtcggttaacctcaggggcagtgttaccacgagtatcatccgagacttccgccagccagttggctacagcatcctcagcagcttgacggttctggaagtacggagtgatgtcgttcaggaactcgggggtctgaaccttctctggggatagaccgaatggcatatagttggggatagtaccaacggacattccaccacggttaacagcctcattccgtacgtcatccatcaaagcacggagacgggtagcttctggggtattgacacctgcggatgtatctgagataatcctgtcgatctctttcgaagacttaccctcgaagatgttatcgagttcagagttccacttacctgcctggagttcctgatcctcaaagatagtcttaccagaggctcgcttaccactcatgtctgccctgaaagtctcagagaactcgcgggcgataggggaggccttagcaagtggctctagaagggacgtagcttcgtttcctagggcatcccaggctttcttgaccgtacccctaggctcaaactcagaagccttaggaggggcctcaggggcgttaggatcaaccacagcagatccagcggagtcctgatgacgacccagggtgtccaaaccggaggatacagcaccaccagcagtaccaatagcggtaccagtgaaggcagccgtcaggaggttatccatgaactgctctggggtttgtacctgccctactgcatcataagcaatagtatcctggagagcctgttgagcaccagaggttacaccttcagccacaccagagactgctgcatgcttaccagcctgggtaacagcctcgatagcggtttgcttagggagtccagactgaaccagcatctggtatgccccgtccttaccgatgtgcttcaagagagggccagcgatgaccccagcaccagcggtatccagggcagacagtccagcacccccgataactgcggtccagggattgctttggtctgggtctagctccttcatctggttgctcagggcacccacgttgatacccatggagcttaggaaggaaccaatgagcgctccacccatacgacctggggccccaaatacagagccagccttagcccctgctgcaccaccagcaagtacaggggccatcgaagggagagcctctacaatgttattcttgaggaacgaaccgatggatgggatatcttggatatcagcgaaagaccgaacatcaggggttccgtactgtgacgcttcctgagcattctcctcggccatctgtgtgccgtagtctttcaggtagtcactgccagtcagttcaccaagggtagcaatggtaccaccgatgttagactgcatggtatcaaccccgcgaccaatcgcagagctaatagaattagggtcagccggagttactagggcactcaggtctggggcaggctcaggggtagcaggggctacttcctggggtgcctcttcgataacctctggctcattcaaggaagccaattcagcggctacgtcgaggcccttgacctcagccagttccgcatcaatagcggccttcagttctggagaaagagccataagtcaccttctagttgctggaaagagaataggctcttaagatgtatcttaggatactaaccttcttagtaagtaagtcaaaaggaagaaggaatcttaagagcctataggtctattatactacattttggatactttgtcaagtaccttttatcgggttggagcaggatagtccagatcaccaccaaagaaccagttacccgtaggttgaagcttagcagcctcccgctggataataccaatagggttagccccagggttagccctcatttcgttacgaagggtctgagctatagcctgttgggcagtcttaccaagcttcttaccacccagggcctgagatccactgacttcactgaggatgcccaaggcatctttggtagtaaccggctcacctcgggctgccttagctgctgcctgacgtgcctgagcgctaatcttagcagtcttcagacgtacagcagaactaagctgggcattctcttgagacatatcctggccacgacgggttgtttcagcctgtagctgagcccgttggttagccatatcctgtccacgctgggttagggcaaggttggctcgcccccgagcagcctcctcagcccaccgatccagaagaccagtgttcttacgagaggtttcctcaagggtgcccttcttgacctccaggttcccttccccaagacgtacatcagcagcatccttagctaccttacgttccagatccttttccttgatctgacgatcagcagctgcggcagccatcttctgctggttgatcccagcctgtaggttacgatccagttgacgctcataggaagcagcgaacatatccccggctttaccagtcttgtctatggccgaagccagaagaccagtaccaatgagagcataagatacataacgagacaggtcatcattatccatagtcctcatctgggtcaactcttcgttcacccgattcttaagctcttggggtttaagctctacaccctctctctgggcatcagcctcaactacagcctgggccatttcaggacgacttacagcaccagtacgaagaccctcagctgcaccctgttggataacctgacgattagcctcctcctcatctgctacagcagcaccagcctcggaagccacctctggggtgatctcaggctcgatagagggttggttaggggttaccccataggacaggagttcagccccagtagggcctcctgtggcgttctgggctgcacgttggcctacaccctgggcccattggtttgcctcttgagcaacctcaggccccatattctccacagcctgactagcctgagccatttcttcagcacgagtccgttctgcatccccgagttctcctggggttacagcagcttgtatacctacagatacaggaccaccgaggatacctgcgatacgacccagggcaccacgacccgttgcttcagccgcaggggctacctcttgagcagcccgagaccaacggtcagggttctcaagggcagcctgagcagcacgacggacacgatcagggagtccagagccttctacagccagcggcagtttgttccttgcgattcgcgccatatccagttcattctgagcagcccgaaggatgctagggcgaattggggacccttcataagccatgctggccataggattaacctccaaatagtttacttaggattccagacttgggttgctgtccgaaaccgagttcttctgcgctaggaagaatgcccattcccgctcccatacctgctgcaacttctgctgcgcctcgttcgcttgctcccctagccccttcgacagaaaagcttggtactgcttctgaagaaggctcacttccttgcccgaggagagccgcgagtgctgctccgcccattgcgccaaaagggtttgattgtccactagactctcccgattgcattgtcccaaggtgggtggggcggtaggaaccttgacggctcaactgtacccgctcctgcccaccacctatattctgtcctatagcgaacagcttctgaggaagggaggccattagaacagaaggcccccgaccctaccaccagtattcataccaacagaagcacccgctgggccaccgaagagagcgcccaaggaagcaccaccgagagcacccagggcagacccgaggccaccaccaccgccaccacccgaggaggtagtaacgttggttcctcccatgtcaccggagataagctccttgtaggcgagtaggtcgttaaggctgacgttattctcataggcccacttctgtagtgccccattgatctcctgctgctcctgattctgaagcatactaccagcatctacctgcatggcattaccagagccgaggcccttagcaatagccgacaggttacccagggtattcaacctattctggttgtaagcctgctggtcttggaaagccaactgggaggcgttattctgttgattctggagcaacctagcggtagcaataccttctgctacacccgctcgggaactcccatactgaccagcattagtggcccctgctcgcaggtctgggcgtaccgtagtgtcgaagtcccattgcatctgctcgttggctgcaccaatggcattcgccaagccagttttgttgggatcgtaaggaccaaggtaatcagccaaagagctaacacctgagctacccaggagagactgaagggcacccccgagaccacccaacccttcgatgccgccaagctggagagcattttggtcagccaccgggtcgaagttcggatcacccccatagttagggtcaaagcccccgttatgtagccaatcactggcacccgagagtagttcattatagttaccttgctgatagggtgtagagacagaggtggtcttttgcttcttactaccacccttgtaagcccgagaatctagggcatcctctacatcgaaccccatcagacgctttacgttaaattggaggaagttcatctggagttacctcacgatagaaggatacggagtcttcggtgtacccgagtttctctagggtaggcttccagccccgacgaccttcgcattggataaaccgacagttaactcgttgggcgaactgtccgaggaagtcgtctacctccgagtaatctaccggggtttcattcccaggcatcttaccactccagaagaagtgaaggatgttacccaggggtgcttgggacacttgaattacaccagcgtagccactctcttcctgatagaagacataggcttcgtagttaaccaaggagtggaccaagtgttcgaagtcccaaaacttaccgaggtccgtcctattgaaggctcgggccagagcagggactacggtaggaagcagatcgatattctcacgagtaatcaaatgaatcatggagtcaccaccagggggaatgtgaatgtacccccgaagactgctccttggggaattccttggattagaacacggccattagctgtgatcttaaacattgcttggttaaccaccccagtctgaatagtagccctgttgagaacatcaaagacttgatccaacggaggtgcgttagggtcagacggaggtggataagtaatagtgctctgcgctgggatgatgctggaataggccgggataaacaactcagcagggggccaatacgcctggggaagatccaggacagtagctccattagtgtagttaccaccagacatgagcatggttatccatacttcatccttagcagtgttcatcctataggcacaggtacccatcggttgatggttgttctgtggggtaaataggataaagtcccccggcaggtccttgggtttagtacctgcgagtctccattggttatccaagtcgtaatgatagatgccggatactggacctaccactccgggggcaaaatactttacagtccctggcttgagcttcttagggggctccatagagaccccccagtagccgtcagctaggtcattaagagtctgtccaaccctaacgaattcttcattaaggaagggcagcagttcctcctcttcctgtggtggaatcgaagggctgtacttttgactcatcgcatacctgccttcggggccatttcaatagtgtacccattgaagtaccaatccccctccgaagagaagtcgaacttcaaggctatataccggcccacatgtttagtgtcaatcttatagtcctgaccaatccggtatgggtaagggcctttccatcgaataccagaaccttgtacctgagcgttacccacccagatgttacaagtaccgttaccagtaatgtgtggaatgatggcactcactgtcttcatcattcgatcatccccgagatagatatcggatctctcaagggtactgacgaagttctgtccagagaatgtagagttattaccgaagaggaacaatttcttatcctggaaagatgagaagatcatactggactttgctgggttataagagccttcaccccagaccgaagtataggtatcccaggggttggggtcgtcatcccagaggttagacaccttaggatcgatgatcccgtaggctccactgagaacgttgggaaggtctcggatactccaagtgttttccttccagttccagatgatagccctatcgcagtgcttacctggctcagacctagtagaagagtagcatacccacatttcagtattcacgtggtctgcaattacgaaggtccgttgatagttgtcagggttaatatccgagaagaagaacttacggacctgagcatcaataacagactgcttctgcacaccgttgtggacatatacgtcaccgtggcctactacaaagtggttaccatcgaactctattgcacagttgggtccgaggatacctacgtcgttaaacagctgctggaattggaagatgaacaatccaccgatataccgcatggagtatacagagtcttccttgtagataatgaaggagtcacgaagcttaacaccatctacgatggcaccattggtatcagccaaggtgttctgaccagcatccttagtagggtccgttgggtcccaagatacaggaatacccccagcatcagccgaggtactccaccagaccatctgtggcatttctacagagttctgggttacgttcaaggcaatcataaagttcttgaacgacttcattcgtttagcgaacgtgttagccggccagttaggcatgggaatgaacccactattctgtggcatcaacacgtaaggatagttgcttgggttgttagcaaagatgacaccattgaatgaaccagaggaccatctactggttacacttgcagagtgtccacctggggatacatccacaacggtagtaccatccgccaagtacatacgctgttcgccacacaggagccaataggggatgttattccggatgaaagggaacatatccaagattggggcctgggctgtatcaaagataggcgtatggcccagagccttctgagccttgccgttcttaaaccggacgttgttcccgaaggaccatttctccagtggcaggtcagcgggggcgatatcggtcacaatccccgtagggttcttgacctcttgtctctctagggccattgtatacctcagttcttaatgatgaagaacacagaacagaacggtgggatattacccaacggcatgttgatctttactgcatggttgtgagtctgaccttgaccagcagggccagtctcaaggttggtattggctgcgttaccagagccacccgtcagagcacccgagtcacccgcagaaccggtgagggtagtagcccctcgggatctccaagtgtgggtatgtgctgggatttgggctagggtaagggcagtcccttcagtgaacccatcccatacaatgttagcgctaccgcctctagtacctacagcctgggaagatccgtcgataccccaggggaatgcaccaatgaggttggggacggggataccattagaggtagtccctacaccattacaaagcttccaacctgctgggatctgagccagtgacccagcccacatgataaccatcccaggtttaacatactgggttgtatcagcgactgcgtttagctgggctgccgttacagtgacagcctgagaaatattggggaaggtattcttaatagcactcttaatgagtcgcaggtggtcatccccaaaggacttcagatcagagccggtagggttcgtaggcaccaactggttaatataagttgcgacctcaagacccattcttggcctcctttatctcttctttcatttcttttcgggtgacataccgctccccaaagattgccatagaaatctggagatcgctcaccgctttggtgagcttctccgtggcctggatgtttctttcaagcagagcctgatgaacattctgaccgacaaccgaggaacctaccgtcactaccgaggatacgaccagggcactgacgatgctgcccaggttatcagttagaagttgcatcctccgtcttctccttaaggttgtcttccaggacttttacgaactcgtcgtcaaccttagagttagtcttctccgccagggccttagcaccagtcacgattgacttagcgattaccttggttgggaagagggtagccagaaggttgattgcgagggtttttagaaagataggcatctgaagctccttaacgttcaatgtctttgatcgccagtcgagtgctagcgaagtcagcggcattctcctcgttctggagttccataacagcccgttcgagtttctgaccccagaactgggaccgagcttcatccatggtgtacagataaatctgctcaaggacaccatagagataaatctgcggatacttcgtcagagcccaagtcgttgggttagcgaggcttagctctgggagtacagtccagtagttcacaatgaacggggcaccgtcaggaacaacggggaatactcgccagaagttacccaaccgagtgtagtaggttacaccctgaggttggtagttatagttaacatagtgggtgaagatatcttgggtgatgtactgaagagtacgcccaccgataagagagtcacccgtgatagaccttagagcaacaaagtgctcagggatctcaatgccaccaccgaaggccatgagagtttcgaagtgttcgttctccctcactcgtagcaatcggttaagacggtcagtagtgttcccaatgaacaacatcagaagttcttgggtaagatcctgacggtcagaccactggatagcagcaatagcgagatcagttacgttattgatcgtagccattcattacacccgtgcctcagaggtccgcatccgatagttatctcggtcattaagccaacgggtaaatcttgcggcatggtctgggtcacaaccaatcaggtttagatcgataggaccaccttcagccatgggacgattccgtagtgcctctacgacaaccagggggatacttgctaccttgcgcatattatccttgcggttgctattgacacccgagtggcgctcttcggcgttagcggacaggattgactcaacatcttgagtatcctttcggataaagagcccaaggtcttcgtcaattgcataagtcgattggatactcatgatgtacctcctaaggggaaacaaagggccccgaagggccccgttgggttagacctgggctacaacgtcgcggatcagagcaccggacttctcgttgtttacacgcagggtgtactcaaccagcagctggcgcttctcgctgtcaccggtcttagccagttcgtgctggaagaacggacgcaggtagcagagggcgtgcatcttcggatcaaagatgaacatggtgttttcgtggaaccagcggttggcacgaatggtgtacttaccgaagtcactctcgtagacatccacggtctgcgcaatgcggttgtccgaggcatccagggtgatctcagttgcacgacccttcatgttcttgctgatggccttcttgatcgagctcgaagtctggatcgagttagcctgaccaccgttgcgccagatagcctcagaggcattcaggagcatgtcttcggtcagaagacggaggtcaccagcggtaccagtgtcggaaccatcaccagttggcagggtaccgttagcacctaccgaaccgttggtcttgtagtaggcaaagatgtttgccatctgacccggagtagtggtgttacgctggatcttagcctgaggggcaccgaccatggcgtattccatgtccagcttcagttccttcgacttcttagccagctgatacgccagttcgttcttacgaccagccttcttgaccttatctgcggtaccggtgacttgcagggtctcgtccgagatttggcagaagttgttcagcatggtggtgaagctaccagccttgatggttgcatcctcaccttccactcgggtgttcttacccggctggcggagttcatcagtctgccactcgtgggtgatagcggtagctacgcccttgccgatagcagtcatgaacggggtgtcatagggtgcgatgttgtagatgatatcgataaggtcttcgcgcttaccgttgatctctacagtcgagacggcattagttggagttgccataagttacgtttccttctattagaaaatatcgagagaggagaagagagcagcagcggcttcaaccgactgatctttcctcagattagcgcgggcagctttaacccgcttagaaccctctgaggcttccgccctacgagcagcaggtttaactgcggcaggtagttcagtctcctccttcttctctagggcagccttgcgacggacctgagattcagcccacttacgtgctgcatcaagtacagccagttggcgggcatcagatatccctcggatctcatcctcggagtatccaatcgatttgccgtaggacacaatcttgtcaccccaagactcatccgtggtcatttccgggataagtttcttggctagctctgtctgacgcttaacgtaggcagagtggacaatctcggctcgcttatcctgcatagccttaatgtcattgcggcgtttaattaaggcctgggctcgatctcgggcttccagggcttccagtcgaagattttgatacttctctgggtcctgggccttaagctgctcccagtttacattgtcatactgattagcaccagcaatagcggtaacagcatactgctcaagctcggccagtagattagagcgttcagcatcaagctcttcgaatttagctgcatactgatcctctagttcagcttgtcgagttacgaactcttcattgcgaaggtagccactcttaagctcttcgaagttaacctcgtagacttcatccccaatcgggatctcgaagagtttatcctcaggatcttcctcggactcaacctcgggatcttcctcagaaccctcttcttcctcctcggactcaacctcttcggtgtcctctggagtaccttcgtctactacctcttcctcctcttcttcccctacgactttaccatccacggtttcatcaccgggggccaggaggtcatcacctagcaaatctccgaaggcttccgctgcctcgaattcatccatgccttgattctcaaggtccattacttatactcctttagagtgatcgaatccaagattgcctggatacgaagttgtacgcggttaagggcgtggagctcgtggtatatcgcctcccgagtctcactatctttgggggccgtagccttccattcgccctcgatctcttcttggacaatacggaaaagctcaggaagaacgttctcacgtaccatctgttgtgccgcatcagtcagcactagactatagccaaaacgttctcccaagattatttcctcactgccttagatggcttcttagtctcaggtactttaccgtctccgatataagcagcccgagcctgagtagcctcaagatgatactccgcttcgttacgagcccgttcccaagtgaaacgatcacgctcaagttgtagttccgcttccttaagggccatttctctctgctgaaggacagcctcttgcttcttcagttcgatctcagccagtcggatctgagcctctacctgcttcatctgggcctccgcttgcttagccaaggcgtccgattgggcacgttgggcatcagcttgggctttgatatcttcaggcttaggttgtgcttccttctgctccctgatggccttagcctgttgagcttcaggagaatccgggttagtccagaagcgatccgggtctttatacccagcgttctctgtgacttccttaaggatattgtaaaggttctgctcagagactaggaccccaagaccaccaccccctactacagcctgggccatttcccagatacgcataaggtggagcatctgctggtctttgttcatgttgccaataccaacggtaaccgtcaggtcggatctctctctccagttggcagggttaatagcaacccacttgcctcgtagctggaagacctcttcctgattctggtacttgatggcatggtcatgcagaagttggaacaaacgcttaacaccagtctctgcaaacatccgggcaatcaggtcaatctgttgctcagcagcagtcatcaactggttaacactcatagccgcttggttagagtgcagggtgttttggtctagtcctcgggtacggtcagtgatacctgtccgcttacccctgtctgcctctagacggtctagcataccgtagacttccccagacagctgaggggtctccagaggcatgatagagttcatggccttaacccgaacgatacccgctgcctcgttggtcagcaagtcttcgaggttaacctgtccatccaggactacagatcgcccttggttggtccggtagatgttatccatgatgttgcgcatgagcaccgaacggatctcttgaatgtctcggatcttatcgtagacactcatcccgtggaacttatgggcaattcgataggcattcaggtcagcgaagggacggcaatcccaaggctcgttgctgatgatgtagtcgcccacgtacaggatacggcgcaactcagagataccatccccatctacgtccagaagggtgtagcactcagaggcccatacctcacggttggcttcagcatcatccccagagttgtactggagttggccagtcatatcgaagttatcacgtaccaacctttctggctgactatcagagaattcatactcatcgtatggaagctcatctagtacatcctcgggaacacccaagagcctcaggtcacttacggtatacttctcacggtgacagaggaagcgtgcatcatcaatgcaggtagccaatcgatcaaccaggaagttctcaggcttgatacaggtgactttaatctctcgcttcttcttgtccttgcgaattttaatactgtaggttccatcctcatccacactctgtgctagaatctcagtgtctggatcagccaggatatccgctaccatttcctcagagagaccagagaatcgttcgaaggtaggattcaggacctcttctacatagacctttacaacaccggtcttcatcatcagagtgtcttggaaccagtcgaacattaccttgaacccctcgttcttacgcatgaagaggtagttcacatactcagtctcttgctctgcctgttcaacatcttcggcagtctgaggttcatacttaactacttgaccgcctgacgtgaataccttcataagagaaggcataatccagtctacagtctcttgaacatccctagatacaatcgcggacttacccggacgctcattaccgaagggctcaccgaagtaatacttcagggcttcagagcgttgtttagatagttccgacgagttgaaatcaagggcgtcgttaacaagttggtctagatgacgaagtacctgttcatcatccataggcttaatcttgcgacgacgcttagccattagacaatactcccaaaccaatcaggggtcaactttgcagtatcactcctgtagtatccactgtttcgtacagcaccaggacgtgcatgccgggaagccatcaacagggcataccgggtagcggatatcatatcgtcgtttctgtcgataatctttccgtcctttcggtggtacattttcatttcttttaggaagttcgtacacgtattaaacaccttcagatcaccattctccatacgggtcaacatccagttaacgccgaactctacagagttacctccgtgtttaccatcaggacccggtgggttactgaagggctcatacactacattgaggttgtggtcatctttaagaaggtctacgaatctacgaccagaggttgctccatcgtgcttaaaggcatcgtgggggacaactaccgggatctggtgaccacccttcaggtagatagcatcagcgtgcatccccaaggtctcaccactctcacttctctcatcatagaggtagtatttgtctttctcagggtcccaggcaacacaggcgatagcgttagggtggtcaaacccaaggtcgataccgatgatcctatggaagtgatcggggatctggaaaggctcacatacaaacttctcttccagaatggggaagactacaccagatccgagcataggaacaccctcggccctcatcctgcgttctgctggagagtatacagagagtagctgctctttaacttctggactgaggtgtggggcgtcttcccagcttgcatggacaaggaactgaccaggtttaagatcctggaggaagtccttgacgatctccgtcagaccatgctctggggtaaacgtcagatatacaatacccccagtagtagccgttcgggttacacactgggtataaatatccttggggcattcctcatcgagccagataacgtcgatggcagtacccatgaatttgtcctgggacatttcgtaggacttgaagataagggacgagaggcccccggaggcatgcttaacaactactgcttgcacacatccgggtttaccttccctacgaatcgtctctacgatatcttccttggggatcatccccgttccaaaagcctcagggttcttccagtcacctagtagttcggactgaagaatatcccgagtggtatccgtggagatccccgccgcccagcagttcactggacgatcatactttctaccagtccaccactcagggtagcgaccggtgaggtggcaggccatgataaaggccccggtgtaggttttaccacagcggttaccagtcatagccagcaactgggcgcagttcgaggaagctgcgataaacttctcttgccacccataaggagtgtactggttcatgcggaaatacttctgccgctccgccaactccttgactagattccgtagccgctcttgggtatccattagaccaccttgtcacctactgttgatgcacgccacagggcccgttggaggtcccttacgcgcactggagtttgtttagcccagaggctatcttctgcctcccatgcagcttcatcaaaccttccggacttcaggagattccacgtcttggggaacttcttcgtccacgctgtacccagctggaagttgacgctaacgagggcatcgaatagctctggagtgcaaaaaggcagctgagatacttgcccttgggctgcatcataggctgccttactatcttgctctagccaagtctctgctcgtgctagggtaatcggtccgtcttccccagggagttgcaagtggccataaccaccagttatcttcccgagggagtctttgtaccattttagtaccaacccctcccttcgcttgattagatcaaggtacttaagaggctgggaaagaaatgactttagccaactctggctcttcgtcgagaattcgtcgaacttcactgattagatcctctgcggacatatcttccacattcttagtagtaagctccagtttctgcttagctccgaagcctccacgatccaggatatcctgggccgccttgaggcgaatcccacctttctcttctgggttgctagcgatctctacaaccacacgaagcgccatggggacatgactcccgatgcgctcagagataaaggcgttgatgtattcggcatgctttcgatggtatgcagctacgttgcgttgcgcatgattaggagagaacccagcggctatatatgcttgggttttgttcataccatctgccagagcctcacaatagaggtccagcttttctttagcagaaagaggagcagccccaatcgagacaaccttttcgtctgacatacactgctccgatctctctaaatggtcaccccggtaggactcgaacctacgacctcctgtgtccaagacaggcactctaaccaactgagctacgaggagttaatggtggtcgaaggaaggaattgaacctctagcctaaggcgtccgggttacaaccggatggtagtagccatctacctctacatcgacctctgttggctgggacggcagggctcgaacctgcgacctgagagttaacagctccctgctctaccaactgagctacatcccaatgaaatcttaaggtaatttctcaaccttataatactattatatcatactttttctattttgtcaagtcttttttcttctttttttattttagtcgcaaggcccggttttgttagggtttttgctggaatgggaaaggggttcttaagactatcttaagataaccttaaggtaactaaccttcttagtaagtaagtcaaaaggaagaaggaatcttaagagcctataggtctattatactacattttggataccttgtcaagcactttttgatatttctttgataatcacatgatttacccgacgaacggtatgatagggttctatagatataccctaagactacccttcgtaggttgctggtaaggggtaagtggcatagggttcccttgatccaggttctataggtataccttaggactacctctgtttgctatgtcctggcctattgccccctatccagtaatataccaacaggtatcgggggttgcctttgatccagggcctataaccgggggataccccaaaagtctattttatcctccggtgtatctggggaatatccccccaggagtcccccagataaagtgggggtggcctatccacaggggtatagcccctagcccctccctaggataccatgggattagtccgggggtcaacccttagacccttgggctaagccccctagagctaccgttcatcgggtggacactagggtattcataagaaaaatcttagggtattcaggaggtggatcggggggaat

SEQ ID NO: 68 - DNA, 46578 bp, synthetic construct
  source 1..46578: mol_type = other DNA
ccccaggagtcccccagataaagtgggggtggcctatccacaggggtatagcccctagcccctccctaggataccatgggattagtccgggggtcaacccttagacccttgggctaagccccctagagctaccgttcatcgggtggacactagggtattcataagaaaaatcttagggtattcaggaggtggatcggggggaatatcccttgataaccccttgaccccctattgacttccctcgataccatatgttaatcaaagactgtctatatccgggggtttgctgaagactgatagtccatagactgtataaaaaaccagtagacaaccccgtaaggaatatggcctaatggctccgccttgaaggaaaccgacaggcaacgggggaaacccctaggggcttgacaaaccccgcggaacctggcctaatggccaccacgttccacctaggccaccatcctccaagtctacggacattaacgggggctgccaaccaaaggggaatgcccaagtcacccaagtataagaccggcaggcatcgggggttgacaagggataggggaagcggtaagatggctcccaagtcaacggcataacgtgcatgactccctcgggattagcgtagccttgacaagcaagactgatggccactcagaaaaagagcctatgccggagaaccggacgaactaacccccgtcagagggttgacaagccaagcccgaggctctaacatgggcacccattaggtgacggccaccttgggaaagtgtaccttcgacggtccttggactgaacaagggagaaacccgaaagctgggggaataacgcacactccggaagagcgtaggttctggccttgtaccatagaaggtccgactggttgcctgctccagcgtaaacaattagcagagttcccggtagaatcgtggggaacagtatgatgggttagtatcgtcggcttagcaacgagggcgaagcgtggtagatactggcgaaggtaggggcgagggattcgaagacccccgaggatagccagaggacagaccacaacgaggatactaacgcggaaaggggccggctacgccaatgccaaggtttgccgactaacccctttatcgtatcgtagtgtgtgctacggctgatgattccaaaaggatgaaacgatgaacgctgctctggataagaagctgcgccgcaaggctagccgcaaggctcgtgctcaaggtctgaacattgggcatcttggcaaagctcagcagcgtgcagaacagaagttcgggatcatttccaattgtaacaagatcctggatagtaagtttgcttccctacaggaaaaggccggggcacgcaagcgcaaggctctgatgaataccgattggcgtaaccgtgaggatactaaactgcgcaattggtacaagcctagcaagtgcaagaactcccccgtcacccacatcaaacccgaggtataagttatgagcgactacaagcgcatcaacggcatcatcaagaccatcgcccagcgtggtgcgtccctggataagctgatccaaaccaccggcctggatatcctcaagcatatcgaagagcacggcgaggtttcgctggcatgcaagctgttcaaggccatgccccaggggtcccgtcgcaacgccctggccgcgtggttcatcgaccacggcaagatcgaggccaatatcgacaaggaaaagtccaaggaattcccgttcgtcatcgccaaggataaggccactcgactggagcgtgcagccgaaaagccctggttcaagtacaagaaagagcgtgacgtggccgacgagttctccctcgatcaagccatcgccgccttcaaggccaaaatccaacgtgccatcgacaagggccagctccaggcagctgacgagcgtatcgccgtgatccaacgtctggaagtgaaggacgaagcgaaggcagcctaacggccagggccaggggtgtgtactatgacgcgccccttggttcctccctagagtacatggtaggtccgtgtattgtatggatgaactaaccgaggataaaaccgtgtggaccccttttggtagctttctggtagctgttacaaacgattacgtgcaaggacgttgtaactcccgttcgtataacagcgatgggtctgagcaggtagtgtaccgttgggctttcgtcgatggtaagttcgcctgcggtgtatatgtagatggccgtcccatgggcttctgtgggtggaccaaatgaagtccacctacgaagctgcccacgaacgtgccctcatggttaatcggctacagaagctaaccagaatgcttcgtgtccaccacgaccctaagtggaaacaggaacaacaggaacttatcaagaggttaaggcgatgattatctctatcgtggtgtcttgcgtaggcatcgggtacttcttcttccgtgactggaaggaggagatgggtatcaactgacccaactgatgaggccatggtgattcctggcggctaaggatttaaggtaaggaggtttatttatgagcattcaattttcgaaaattttgcttcttacggtgctcgcaacagccacgatctccaacgcccaggataaaaagtctaaaagtaagactgccaagattgattggtctcactggacagtgacggtccctgaggagaacccggacaagccaggtaagccgtattcactgggttatccggagattctcaattatgcagaggacaaaatcgcgtcaaaatacatgtacgacgatccaaaggacaaaagtgtcgtgttctacgcattcccgtccggcgtgactaccgctaacacccattacagccggtcagagttacgggaaactatggagaccgggtcaaacaaagttaactggaccttcgctaagggtggcaaaatgcgtggtacttacgctatcgacgacatcagcaaagagccggatggtaagtattcccgcgtaattatcgcccaaatccacggcgtactgaccgacgagcaacgtgatcttattgggcaaaaggacaataatgcccctccgattctcaaggtgtactgggataaaggtaaaattcgggtaaaaacgaaagttttaaaggacctgaacgccccttacaaagagatgcttctggaacacgcttggggtgatgacgaaggccggaactttaaagagaagattgacttaaatacacggttcacattggaggttaaagtgagcgatgggcggatggaagtcattcttaacgacaccgaaagtttggtctatgacgacattcacatgaaaaaatggggcattttcgaaaactactttaaagcagggaactacttccagtctaaaactccgggcacttttgcaaaagttaaaatttattcacttcaggttacccactgaacgagaggtttaagatcttgggaaatcagcaaaggaaaccatcccgtgaaacgcaacgactatcgtaaggtcagccgcaacatgcaagccatcgaggctatcgaccgcaagattgccaaggtaactcgtgagttgaccaactccagcggcaatcaccttggtaaaaccctggagttgaacaaactccgtgccaagcgtgcatcgctggctaagaacagggcgcggtaatgtcatggaagtatattgcatgtgccgccatacgctcacgttccaatgggttgttgctggtagcgtgggtggttctcttcgtcctgtcctcgaccttggacagcatcccttttgcatcgtgaggtaatccgatgaagattaatgtggtagaaaagcccaagaaggttccggcgcataccctcaaggctacagatgttttccgtgttgagaacatccatgggatggtacttcgggatgaccacaaccactacctccccaatgacggcgatgtgtacttcgtttgcctggaggctggtatcatttgcagcatccatagcgactgcgaggtcatcccggtggacgctcaaatgaccgtgagggtctagtgtactatgacgcccgccctgtatctgctcctctggttggaatccttggtcagtatccgcaggttccagcctaaccacaaggcgtaccctggttggtacgtcacccatatccgtgtgtctatcttcggcaaacgtgtaggtatcgtctatgaaatccactaaaccgcaagtcttctggttggtaagcaaggatggtgagcgtcacgtaaaggtcatcaatttcggccagttcatcaccgaaaccctttacgaactcggcattccggtggaccacatcgttcatcgggttcagtaaggtgacgccatgaccaatacctctttcaccgtagcagtggcaaagccaaggtttgagttccacatcagcaagatggcggacggtgcctacgtccattcgggtgattccgggtctgtcgacttggtttacctcaagaaaggcgaactcgtgaccattattcacaaggatggtttcaacatcctcaagtgcaaggaaatcggtactcaccctgatctattcccggccaagtggttgtcggtgaatgcctgcatgtgggggccgtatgaagaataaacccatgataggccagataatggcccaggagcgccgcatgaagcgtcgggtagaaaagcgggggttcaacatgagcctccaggaaggcacccaggagccccgtggtgagcttggtttcaccttggctgccgtaggtatggagtcgagccgatcggcttaccttcggcacgccagggaggccatgatccaatctggtgagccttgccctcattgtatgccaatcttcggtcccaaagagggccgttgctgcaactgcgcgagggactggtgatgggccggtcgaaacacctcacgttcctcccgtcgaggatcactgtccttgacgatgatacggtctatgtgccttggcgataccagttggaatccctctacaacatggcttccgctggtggtgctactgaccccgaggcagtcaagggtgaattccttgattgggtacgagcggagtatgggcgatatgtgtccatcgagcttgaaggaatacccgaggacagggaagatgccttcgatgagtatgtattgaaggggtctcagcaagggtaagcaaaatgatgacatacctcctgataatcccagcgatcctgatctacatggccttctccttgctcgtggctggcatcgccgggctggcggcaaactgcgatgagtacgggaggatgagccagaaggaccaggacgtttcaatcatcctcggtatcctgtggccagtgtcactgccctggatgtgcttcatgtgtgttatctggaaccctttggctaccaccatccgtgcggccaaacgactaatcaaaggagattactaatgcgccgtatagacttcccttcctgctgcaccgccaagatttacattggcatgggcccctcgggtaccgctgaccaccgagccggggaagcgtccaatgggttcagcccccgtggtttcgccaaggaattgatcggggtcatccgtcgcgagtacaacgaaggtcatggcaccgccgtgttctccgtgaacaacgagcaggtggtagccgataccatcctccgcagaatgggcagccactacaacccctgggcctccagctacaaccactcgacgaaggttcgggttcacgtcatcaacgtgcaagctgcggcagaaatcctcatcaaccacggtgtcctcatccgacgactcggtggtttgcaggactaccccggtactgtcgagcactcggaatacctcgacaagctctgcaaaggtctgtaacatctaggccttgacattctgctgaaagtgtggtataataaccttaaggtgtccggggttgctttatatccctaggataccttaaggttctaaccttctatcttcttcatcttaagaaagaggtaagaacaatggtcctcaagctctacactcgggtaatgctcctggctatccccgcatggataagcatcctctgggtagtaccacagatgctgtccccggctgacaccatggtaaacgccattggtgctgccctcctggtaatctccatcctgtactccctctgggctgtcagtcacctgtactcctacgcaagtaagctctctggaaagaaggaggtgcatcgtggccacggtaacgagaagcagtaaggtcccaaccagccccctttacttcgaacgtaagtgtgattcccagatttaccttcgttcggaatcccggaaggacctcaccatcccgatggtaaacatctgcaatgggagtgtcctgtacctacaccctcgggaactccccgtgtatttcgtggcgatacccgagggtgaaactctcaaggtgaaggtgtgatgtactatgacggaacagcagcgagaccgcctccgtaaggcaatccacatggatctagaaggtatcggcgaagatacccccgacctctacgacaacatacataagatagaaggcctgcttggccacccaggtaagcccccgcatgattggggcttctatgtactgatgttcgtcatgttcatttccttgtgcatggtctacatcactccccttctctacaagtaaggaatccctatgaagaaaatcctcggcctcctggccattgctgccatcgctatcaccgcaggttgctccaaggttcccgctggctataccggtgtcgtcgtcaacatgatgggcgactctaagggcgtcgatctgaaggaaaccccggtcggctggaagttcctgacccccaacgaggagttgttcaagttccccaccttcaaccagaacttcgatctggcggtggttactgcccaggacaaggacggcctgaagttggacttccccatcggcgtcaccctccgggctgctcctggtagcgcacccctgctgttccagacctaccgcaagggtatgaacgagatcgtaagcgtgaacgtgccgcaggtggtccgtaacgccgtgaacaacgccagcagcaagaagtccgccgaggccatctatggtcctggcaaggaagcctttgtcaaggaagtcgaagctgccgtccgtgagcacttctccacccgtggcataatcgtcgaaagcctgtacctcaacggtatgatcggtctgccggcgcaggtggtcgaggcgatcaatgccaagatcaaggccactcagacggcgatgcagcgtgagaacgaactgcgtcagacccaggccgaggcagccaaggctatcgcggcagccgagggtgaaaagcaagcggctatcctggtggcacaaggtaaggccgaaagcctccgcatccagggtgaagccctccgccagaaccccggcgtggtagaactgaatgccatcgagaagtgggacggcaagctgcctacctacgtcaccggcggccaagccatgcccttcatcaacgttcgctaaggaggtggacaatgggtaagcgtaaggttttctatgagcgtatctgctccaacggtgaattgaccctgaacggcaacctcaaggccaccaaggtgtcggcacccaccaaaggcaagcagcagcgtcgcggccccttctaagagggcgttagtaatgcccctaggaactccctgggggtattgctggctaactcaatcaaggagaaaacaaatggcccgtatcaagtacgccttcggtatgaaatccaagaagggcggggttaaggccctcaaggtaatgacctctgcctcctgcttcggagccatggagggggtggtaacccatggttataagctcgacggttggaccttcgtctgctcccgtcgaagcaagaagttcatcgatgcacttaataagtgtacccaaggtgaactcaagaccatcaccatcggcggcaaggcctacaagatcccgaaggttcacttctggtcttacgaaagcaaggccaagacttccccgttcgtgaagtacgttagcgggtcggagttgatctctcccactcaacacgggaaggaaggggtttgcggtatctacttcaacccgaaggaacataccctagattcctggtatcccatcatgaagttcctcttcaagctggtatccagtggtctagaccctcaaggtcgagaggagaagattcacatggagcttgctgaaaagtatggcttctggaagtcctacctcgcaatgtctttccacggattggtagccaatggatacaccgggtaccccctcaccaattacatgttcagtaatgattgggaggatatcaagaaaggcgatatccacatccagtccgcagaagagtgcaaccgattcggccgttgggtgcccaaccgtaatgccccaggtggacgtgagtgggtaaggtccaagccctacaagtcagaatacctggggattaagctgaacaaggtggaggtggtaactatttacccccagccaaccatcttcggcaagaaaaccccctacgacatcgtggatacggaactgggaggattcctccggcttactccttctgactgtgaaaaacacggagtggtcatgctggggaccatgggtgaaattcactggggtcgcggctcaagggatatccccctggccctggaaggattcatagagaaaaacttctgacaaccaaggagaaatcaaatgggaatgtatgcagcccataacgtgtactacgatgccgagggtgctgaggttggtcactgctgcgttaaatacgtggctgaatacaccaactgcttcggtgcattctgcgactcaacggggccccacccggatatagtgtgggagaccggggttggacacctcctggtgtctacccacgagaacactgctggtaaactggtagaattcttgaatagtgatctggtcaacaggatcaccgacggtggaatcctctcggcttcccaggactggcccaccgagtggtggacgggatctggccgtaaacaaaacctctccaatcctgaccacttcagcccacctggccgccgacaggctgtgtacgttcgggtggacctcaagaagaacgcatcggcaatcatctgcgcactccgtatgggtgatcgtctctggggtatcggggatcagatgcgtcgtattccgaaggaagctcaggataaaatcctgggattcaacgcagaacttcttaccctcgcggcttgtgcccaggtcggtagcactgcccactgcgacagctatccggcgatgttccctgtgactgctggggagtataaggagcagtgtgaagccaatggggatgatgtagaggatagctacatcagcgaaatcatggaccacttgacgggtgggttgaaggatatcacctacttcgatatcaagagcatccatggacgaactcgcgaagagttcaaggacaagctcaagcaccacaatgacccactctggctgggttataccaaggatgattacctgatcgagtgtgatgggttggatggggtacacgatgatcgaatcctttccatcatggcgcccatcaccatcgacgtaggggaccccggacgggataattcccccacggtacccaccggttattacgaccttcccgaaatcctcgaaaaactggagagcatgcaatgaacaacgcaatccccctgatcggtgcagatcccgaagttttcgtcggctacgaccgtaacccccagagcgtcatcggcttcatcggtggaaccaaggaagcgcccttggctgtagccggtggtgccgtccaagaagataacgttcttctggagtacaacatcgacccggccagcaccaaggaagatttcgtcaagcggatcatttccgtccgactccttggtgcccagatgctccaccccttcggcatgaacatcatcgagaacctgtcgtctcacctgtacgacgaggaactcctccgcagcttcggcccccaggcttatgtcttcggttgcgagccggactacaactgctggacccgtcgccagaacgtgatgccgaacgatgcacctccgaccctgcgcactgctggcggccacgtccatatcggcttcggccacatcgagcgagtcaccaaggctaccacccgcgaggtcatgcagatgtgtgactacctcctgggcctggcctctgtccttctcgacggcgacacccagcgtaagaagctgtacggtaaggccggtgcgatgcgctacaagccctacggcggcgagtaccgtagcctgtccaacttctggatcttctccgtcaacctgaccgagtgggtctatgaaatggcggtacaagcctacacctcgaagcacctgctggaagagtacaagtccatcgtgtctggcgatgaagtccagcggatcatcaacgagaacgacggtgttgcggcggtcgctgctcttcaggccttgggggtgaagtatgaatgacctcaacaacaggcatcgtctggccggcgacttcaacatgtactacagttccaccttcgccttcttccgggtggacggggagcctcgggtagtctacgtggatgacactgaatccatcggggatgaccgccagttcgatggcttccgtctcctgggtaatatcttccgtcccgacggcggacaatactacggcggcgtagtgtacagcgaggtcgaaggtgtgcggcccccgagtgggtactatgacgtcttcggtggcggcgagcgagatacctacgtgtcgttcctcgtgaacaatcgtacccagcgcaagggtgttgacccccggaatgtcctcatcaaccacggccagcaggcagtaaccggtcagatgatgatccgtatcttcctccaagcggaagagatgatctccgacccggcacaccgtgacttcttcatcaaggacggggtagtcaactggaaaggtgtaaaggtagggcagatggtagacaaccggctgtccgtagatgaacaattcaagaaccaggaggacttgctatgtcggttattggcacgcagataggtttccgtaagaaccagatcaagaccccggagcaccacgaggaacttcctgcggttgcatccttcgggttcgaggttgaactggagggtctggaccagtggcccgaggttgatggctgggatatcaagaacgatggatctctccggaatggtatggagtacgtcttctctggtccggcttctggtgaacaggcgatcaatcgtgtggaagccttcgcgaatgccatggaacagaatcccccggcacccaccttccgctgctctacccacctgcacatggatatgcgggatgtgaactggaaggtttacgagcggactgtcctggcctacatggtattcgaggatgtattcttcgatcactgccaaccgtaccgccgggatagcaacttctgtatccccttcttcagcaacgactggttgtcccagaccttcggtcgccgcatcctggcacccgagggtgatcgagagaaggtcttgggccttacctcctggccgaaatactcggccttgaacctccaggtcacccacaacttcggctccatcgagttccgtggtgcccacgcgatgaccactcgctcggaaatggtcgggctgatgcagcggatgatgtgcctcaaggcgttcgcgattgcccacgaggaaacccccttgggtgagttcgttaaggtcctgtcggatgtgaaccttcgtgatatctttttcctcggcgtagcccctgactatgaaatgtctccgggtggccgggaaatgggtatcgcaagcgcatccctggccattgcaactatgggctttgttcgctccggggtagaccccctggaggatgaacagaaccgtcagcgtcgtctccgtgagcaggctcgtgaacaacagcgggcactggatcgtcggttgatggctgcccgaagcgtcctgggtagaatccgagagggtgcccctgagcgttacaacctggcgatcatcgaagggagtaacatgcggatggatcaggtgcttaccactgtccagtccctgaggatgatcgggcaccaagtaagcgtccgagacctcgtagaggataacgagattcttcgtgattccttcgtacttctgctggacaacccggaccatatgcagcgtcaagctggattccgactcgaagaaaacatgtactaaggagataaacaatgtgtggattggtaggcttctgtgccacaactaacgcgagtgataacgaaatcgctcttctcaaatccctcctggccgtggatattatccgtggtgcccacgccactggtctggccaagatcgacccggttaagaacgaggtaggaattcacaagcgggcagtagatgcctacgacttcctggctgatcctgaaaccaaggagttcctggacaagggtcgggctcgcatctacatgggacataaccgttacgccaccatgggtgacaagacggaccatgcgaatgcccaccccttccaggtcgaccacatcaccatggtacataacgggactgtggattcctggggtctccatctgctggacggcaatgacaagtacaacgtggactccaacatgctgtgcgctaccattgccaaccacggagccaagaagaccttcgaagagaagttctccggtgctgctgcggtaatctggtgggactccaaggaacgtaccctgaacttcatccgcaacgatgagcgtccgttgttcatggcggtgaccaccactggtaccatcgtgtgggcatccgagcctggtatgctcaaggttttcctggagcgtcccaacgctaagatccgccttcgttctcccatcgctgaactgaaggctgaagtcctggtaactatcccgttcacggaggccggagtgcgaaagggtgtagaaccccagaccactccggttacatttctcgaccttcccatccccgaaagcgaaaggcaagcagcggcatggtggagtcgctacgtcggtgtctccgactacgaggactatagccgaagccaaggcagccaagcgggaacgaaaggcagcaaagcgggctcgtcgtatggaacgtctggcgatgcgtacgcaaggaacaccctccggatcaacaacaacctcgatgcagcaggcagcaccttcaagcaccgccaactcgtcaccttcgatgttgtcaaagtcgaggcctacgcaaacggcagcgaatacggaactgtcactggaatcgagcgtgaagaaaaccttctcatcgaagctcatggcatcaatgtcgccaaagtccacggctacaccgtcctccgaggaagtatctccaacgcctacttcatcggccaagaccgtgatctcaaggttactgtcgaggatctggcggtaagctgcctggacccaaagcatcggccgactcctggggagactaccccggttttgaggattggaacgatctcatcggagacgaaatcccattctaaacccagggttcaagtcggcggcaccttggggaatacccctccggccaacatcagctaccccttgaaggttcagggacacacgttcaacaacgttcatgtctttcgggacttcgtatcccaggggtgtgcatcctgcggtaagatccctaccgcgtatgaccagcgtaatcgtcatctgacggtgtacgagggtgccaagttcacaggtagcctggatgagtgtgagttcatctgcggcgaatgcgtaatcgaaaataaataggaggtcaaaatgacccaagtaactctcaagcgtcaagtagtgatccagatggaaaccgacgcaactcgtaagtatcctttctcccgcgacaccctggacaagatccagtcgatccgtcgagtcaaggagcaggaactcaatgatgccaacccggacgaggaattcctggtaccggccccggtagtcattgccgaggccatcgatcgactcttcgaagattacttcgagtaaagtagtgcgttagtaatagcccctggccgacccatgccggttcctaagctgcgtacatggggttcaacttaggatcacaggggctattgctggcttcactactaccctcaacagaaacaggagatatgccatgttctacatctacaaaggttcccgagcgtcttccggtgccgtaaatcttcgcaatgccctgggtgcccgaatccttcggtccgaggggtctacctaccgtggccgtgcgggtactgcggtaatcaactggggtaccgtaggtgcagaggcacgacgcctccagggtatcgccccggtattcctaaatgatccggccatggttgctcgctgcaccaacaagctggacttcttccgccacttcgaggccaatgcccctcacttgattccccgttggaccgagcgctgggaagatgccttgggtgtactaaatatctctggtcgcatgtatgcacgtaccgatctgaacggccatagcggtcgtggtatccatctggtgtgtactgtcaatgatgcagaagttgctgcaatcgatgccctccgtagacagggacactacccggtacacatctacggtcacacccacatcccggatgttatcaccagggcacaactgttcacccagggaatcgtcggtaagcgtaccgagtttcgagcccatgtgatccgtggggaggtagccctgctccaggtcaagctccgccgtactgccaacgatacggtgaccaacgaaggccaaagcatcgtccgtaacgtagccggtggctgggtctatggcgtcaacgatgcaatgggacgggatggcgctgagcaggctatgtcggcagcagcagaagctatccaagttgcaggcctggacttcggagctgtggatattatctaccagcacgctactagccgggcgtttgtcctggaaatcaacaccgcgccgggcctggatgcagaaggcagcgccctggaggcctacgtcaagggcttcaacaaaatcttcgaggagactatctaatggctgttcgtgttttcgtttatggtactctcctgtctggtttgtacaaccactaccttctggaaggggccgagtttgtcggcaatgctgtatcctgcgagcggggtctgatgtactccgctggcggattccccatcctctcctttgcctcccgcgctgacctcatcgtaggtgaaatctggcaactccccgagggcgaagcgggggatgaaatgctggagaacctggatgccctggagggttatccgggttggtatgatcgtaccctcaaggatttccgaatcaatggggaacgaatcaaagccctggtgtaccatcaggatagccatatggcgatggatatcgtcaaggatggcgactggaaggcacacctggcaaaacgacaaggagcagtataatgaacgaaatgaccgtagacaaagcagtagaagtctaccgcgataccccgaacaccttcggacaccaagagctacatgcccagaagatgctcctcaaggaaatcctgggacttgtagcttcccagcgacacctccaagactctatcgaggtctccaagattccggaggcctcggatagtcccgagaccagctacggtgggtactgtgacgaatccattggaattcgcttcatgtgggagcgactgaagaaaatcgaggatcgtcttcgggaactggaggaggtctacggtaccttcgtaacaactccctataaaaccctaccgggcaacgtgaatgctgtaccaagcctggttctcaagagtcaactggaggggtaagtgaagaaaatcatcggtgatacggcttgtccgggttgccgagctaaaggtggggataaaacaggaaatcacctcatcttgttcgttgatacagaaaagggtactcggttcggaagttgtaaccgttgtggtcactacgaagtcctcgaagagggtttcaaggttcctgaacgaagggagaaatccgaggaggatatcatccatgaagtcaacgaagtccttgagtatccaattaaagccctcgatactcgaaagatcagcaaatcaatcgctgaacggtacggggtacgtgttggtctatcacaagaaaatggtgaggacgttatcgagcattactatccacgcacccgcgatggggagtaccgagcgtttaacgtccgaatcctagaacctaaggctttctactatcgtggtagccccaagggtggtgttgaccccttcggttataacacccttcggcataaggatatgggccacctgcggttagtcatctgcgaagatgaactgtcggctatgtctgtggcccagatcatggagtcgaaactcccggagaagtggaagcatcttcgtcaggcatccattagttggtcctcgggtgttggttctgctgggcgggatatcgcattccttaaggagtctggtgtccttgagcggttcaacgaggtcatctattgccacgatgctgatgacgaggggcgtaagtcagtagaaaaggtacgtgccctgtaccctgagtgtaagtttgtcgagctcccgctgaaggatgctaacgacatgctcatgcgtaatcggggggatgaggtataccagatgatccgattcggcagcaaggtgaagtctcctgactgctccgtgactgtcgatgaggtatatgctgaggctctggaaccccctaagtggggcaagagttatccgtgggagggcctaaccaaccttacctatggtcagcgtgatggtgaaatcatcggggtaggtggaggtactggtatcggtaagaccctgttggcccacgagattgctgcctggaattgcattgagcacggggagaacgtagggactttcctgttggaagagcaggtagccatgacacttaagaatatcgcggggaaggttgccaacgtgcccttccaccgaccggatatcgagtgggatgagcaagcctttaaagatgctgcgggtaaactccggggcaagctcttcatgtggaagaataagggtcagaacgattgggatcatatcaaggagtgtattcgcttctgggcagtagccatggatgtgaagactatcctactggataacatgaccgccatgaccaaccaccttagtccttccgaaatgaacacggagatcgctcgtatctgtacagagctcgcagggatggccgacgagctaggactgcggatcttcatcttctcccaccttaacccacccaagggtaaccgtacccacgaggagggtgctgaagtaaaggaaagccagttcactggttcccgagctatgcagcggtggtgtcagcttatgatcggattcgagcggaacaagcaggctgacggtgaagagaagcacgagagtcgaatccgtgtaatcaaggacaggaactacggtaacactggcctagtgttcaccaagtataaccctgagacgggtcgcttggttgagcgcgagggcagttacgacgaggtacctgctgacgatgacaccccaatttgattacgtgatctatgaccttgagggggacggactcttcaatgaggtcacaaggctatggtgcgctgttgcagtagacattccgactggggtagtccggggattccggcccgaggaaatggacgtgttctaccgcatcatcgcccatgcaaagttcgtggtcgggcataacatcctagactacgacaaccgggtccttgagaaacttcatgggatcatcatccctccggatcgaagctacgacaccttggttgcatcgaggttgacttggccagaccgaccccagggtcattccctgggtgcctggggtagattcctgaagtgtcacaagggtgatttcaacgacttctccaagttctccgaagaaatgtttgagtattgccttcaggatggagtggtcagtcacgcactgttcaactacctcctccgggtactcggcatgacttggcaagagcttgttgaatggaggactgtagattggctaaaaagcgagtgaggaactacaagcgtgaaagggagctggctattcgacgcggcgaaacgggcgttggctctaagtctggagatgctcagcggcaccgagcccgccgaaaggtggaaaagcgtcttggaaggaaactcggagccgacgaggttgtcgatcatatcaaacgtgttaaagatggtggcggtaacggggattctaatctccgcgtccgtagtcattcttctaacgctgctgatggtggtcgtgtgggcaatcgtaaggccaaaggcattcgtaagaaaaagtaactaaggaggggccttcgggcccccgaggactctctatgttcaatcgaaagcttagcatcagtaacatcctcaattccttcgataaggttctggtgaacctgaagaccttcatccaagagtcttcggaggaatctgagcgcatctacaacgagatcagcctgctcaaagctgagcgtacccaggtcatgcaggacaacctgaaggcccagaaggtactggctaacctggaagaattgctgggaggtaagagtgaagaagtatcgagttaacgttgggttccaggacaccaaggtgttcaacgcagacttctaccgcatcgagttggatatcatccggttcttcgcgggtgattccgatgccaaccccatgaccgtccgagccaatgagatcggtgctgtccgtggatgggtttctgtggaggagattaacgatggcgagtaagaaggaaagcctggaggatcaggcacggaaggagattgccctggagaaggagttctctggtagctggggtggccccgagatcgatgctgatgacttccccttgggtagtgcctgtggcctagatcccgaggtatgcgagtcatgccaatagctctacaagtccttgtcatcttctggagtgcattcttccaggtattcctcctgggattgaactctaagctccttcgggatgacaagatcaaggctgggtttgtagtgtcttggtgtatcacgctggctcagtttgcttacatcaaggccgtggggtcttcccacttggatatcggatggtttatcttcgtatccgggtggggaggtgcccttgggattacctctgcccaatacttctacaagtggtacgacagagtattccacaagaaggcttgacaaatccagaaaagtgtggtataataaccttaaggtgtccggggttgctttacccctataggagatacaaatgagtgaccatgtaagctattccaaacatgtccgtggtaagtacctgtgtaatatggcctctgccctccataagagcatggaggtacaaaggactaacatccgtaagttcctcagcagtccccacattaccctacgggagaagcgtcgggtgttcctgagcctgccagagggattcctgggggtgagctatttcacggggtctcacctgaacctgagttcctactcggatcgtcgaaacacccggattcgtgacaaggatatgagtctctatgatgacttctatgtggacaggggcacccaactagatcctcgggatgctttgtttgccaataaagaggcgaaggagtacgagtttcagtttctgaggaagaagtgggggactgacttcgagttgtctggtgaggatcttgagaacgtcaagggttgccagcgcatgatcgatctgtcctggtatctggtagacctggcctgtgaacgtgggtgttcctacttcgttttcgactggtgattacatgagcaagatcaagagtatcctcatggagcgggtagatgacttcctgctcaagcaagttgctgtggccttcctggagcagcaatggaagctggaccgcagtggtaccgtggactacctctcctacctggggggtgtatctcacgaagctgtggagacagttgtagagaatctagcggagcgtcttaagggggattaagtggattggagaaagtcactgttcgttgagcacaaggtagctgatatcatcagccgccagagtaaacgtggagtctacttccagactcagcgggccaagtggctgatccatgtgcttagcgaacgaatcctcaagattgaccttgaggctgtcccccagatgcccatgatgatcgtaagggctggggccttcagcaagccattcctaaagagtggtaagccgaaccaaaggctccagtccctgtggcaacgtcttgggcatttcgaggtatctggacccttctctgcaatcgagtatgtacccttcgaccttggtaagactgccaagttcaaggactggatgctggatcaggggtggatacctgaccaatggaacatcaaggatattactgtcggcactgatggcaagaagctacgtggatctgaccttaatgaatccttgaataagtacattgaggatctccgacagagcaagtctggacgactccgaatgaagctccaggggatcatccctgggaaaactaccattggggaagtcaagagaaagctcgaaaagcaacgtaaggtcctaacgactccgaagatgactgaagagtcgatggataccgtccagggagacctgggcaagctggtgatgcagcgaatggtttgggcccaccgtcggtccctcttgcaggggctggtagatcaggtgaggcctgatggacgcctagaggggagtgctaacccctgtgcaacacctacgggccgtatgaggcaccgtgtagtagtcaatatccccgctgctcgttctcctttcggacctgaaatccgtgggttgttccaggggacacctgaggctggtgaatggaaatggactgtcctccgccgtgatcttggggagaacgaaagggttaggcccttcactaacatcgtggaggaactcaagaagggtaagtggaagactgtaggaaagtaccgggtatacgtcccagcgaaccaattagtattcgtgggctacgatggtgctggtctagagcttcggatgcttgcatcctacatcaacaacccagagtacaccaaagaggtggtcgagggtgatgtacacacggccaaccagatagccgcagggcttcccacacgggacgatgctaagacgttcatctacgccttcatctacggtgctggggatgccaagattgggactatcattggtggtacaagggcggacggggctaagctccgggcccaattccttgaagctaacccagaccttgctgcactgattgagagggttaagcaggaagccgagaggggttatctcgaagggctagacggacggaagctaaccatgcgacgttctgagtctggcgacgtgatgatccacaaggcattgaacaccctcctacaagcagcaggtgcaattgtcatgaagtgggccatggtgctcctagacgagcgagtccgtaggttaaacctgagggcttggaaagtcttggatatccacgacgaaggtcagtgggaatgccacccagaggatctcaaggcgctacgtgagcagatggaagtctgtgtccgggatgctggggagatcctaggtgttaactgtcctttggctagcgattctatcgctggtcgctcatggaaagacacacattgatacatctgggggttgactttcagcccccttttgtggtataataccttcttccctacgagaggtttaagatatgtctaagaaagtttcccaacgattcaccttcccggtagcgaagctgatcttcccctacatcgtaactccggataccgagtacggtgaggtctaccaagtaaccatctgcattccgaccaaggaagaggccgacaagctggtacagcagatggaatctaaggatgttcgtctgaaggacaccatcaaataccaagagcgagacggcgagtacctgttcaaggttaagcagaagaagcacgtggactggatgcaggatggcgaacgtaagtctgccgtgatgaagcctgtagtcctgacctcggataacaagccgtatgacggccccaacccgtggggcggttcgactggcgaggtaggtatcctgatcgaaacccagaagggtccgcgaggcaagggtactatgacggccttgcgactgcgcggtgtacgtctccacgagattgtatccggtggtgatggcgaggatgatcctctgttcggtggtggttttgctgaagaagaggacaagtccgaggacgtattcgacgaggtattcgatgacgaagacgctcctatctaagggtctagcggatcatgagtcgggggtatgccggtcaggctgcccctactgcttaattgaattcgagaaagtgtggggtgtacgggtggtgagttctacagctgcatctaataataaagtagaggtcgatcctaatggaatcaaacctggtgagccgggcgctaagctcgatagcggcaaggtggatgttggaatcatcttcgaagcgttcccgagggctctatatgcagtggcacaagttgctaacttcggagccagcaaatatagtcgcgggggttggaggcatgtcgagaacggtatccagcgatatgacgctgccttcggaagacacctccttgagcgtcacaagggaaaaactttggacccccaaagtaaactaccccaccggtatcacgaagtgtggaacgccctagcgtccctggaactcgtcattcagcaagaggaggaatccaatggaacttctgttggacccaagggctaagactgttcctagcaactactctgtgatgggaatcgatgtagacctggggcttcccccaggctacagcctaacggaggaagctatggacaaagccaagcgtcaagagagcgagtattacgactggaaggggtatgaagcactggccaatccagtgatagagcacccagagtaccgagccaagggtgaagcctttgccctccgtgtcttctgggaagagaagctcaaagaatcccaggtcgtagaagaggtatcgtgatgattgaggagcggttctggtccaaggttgataaaaccgagggttgctggaactggacactaggtttcccatacaatgctgttcagaacatcagatatggcagggcgtgggctcaatgctgggagtagtccagcgtaaggagggtaagtagtatgatcgcaggaattgatggcgacgtactttagcttcgctacgaattgggacatgtggctatgtcgaaggaacacatcttcgatatccaggtggagaagccatggcctgaggaagaggtccataagctcgtcgatgataaagtcgaacaaattatcaaaagggtaaatgcagatgagtgtgaaatctaccttactggccaaggaaattttaggctggagcttgcgaaaatcaagcaatataagggtactcgaatcggtcttgaaaagcctcatcactgggaaaccgtgtcggcccgacttaaggacaagtggggagcaatcactttccacggtatcgaggctgatgactggctcggaattcgagggactgaagagggagataactttacagcgtgttctagagacaaggatatccgccaagtcccaggatgctaccattacagttggccctgtggagattcccagccggagttgggaccatttcaagttgatggtcttggaacagtctccgcttcttggcgaatgtatggtgttaagaaaccgcagaagtcatggaagcttgagggcaacggtacggcattcctctacgggcaactccttgttggtgactccgtggataacataccaggcctcccagggacgggaccaaagacagcggcagatttgcttggggagctttctaatgagagggatctcttcgcagcttgcgcttacgcctaccaacagaagtacggagataattggaaggagtaccttgtggaaaactttcgtctcctctacctcattcgcgaccgctcttggcttgatattcagcagtccggtaacgagtatcactgctcactgaagaaacattgggagatcccctatgacgacgaagatttattctattgatgaggccctatctatctgtgagggtctcttcaaaatcctggagactactggcttcactgactacaaggtggctggtggtttcctccgggatgcagacaacggggtagcacccaaggatattgacctatatgtacgcaggcctcgtgtagaagccattggtagacgagtctcacgtgtctttgggccccagatggttccttgcagtgatgatgagcttgaggtagaagtcatccggttctacaacaaacttggtcacaagaaggttcgtacggggtccggggaattacgcaatgggtatcccgaggggttttctgtgtgggagtccattggtgttgatctcccggttaacctggtcgtatccactgacagtcacccagcagagttcgacatggggatctgtgaaatctcctgttggcctattggcacccttcgtcgtaaccgtagtggagaaatctaccggtccagggcatacgagtgggacaaggagaataagtgcatcacaatcaatcgtatggttgatccgttgctggagagtggcaatgagataaccgttggccagatcgagagactcgttaatcacgtatcgagggtaaaggctaagtacccagaccaccgagtgtgcattggggattggatttggatgcttcttcgttcacgttcagtctacgcagggagcgcaatggattttatagtaaggcttcaagaggagggtctaattggcaaagcaggggagattcttcagaaccaaactgaagtcattgattgggacgaagtacgacagcgaaaccgagaagatcgtccacgagacgatgccttggatgcagttcaagccgtccccggtaccatacgtcatcgagcacaagtacaagccggacttcaaggtatcgacattacaaccttgtggatcgacgaagaatctgttggtcgaggtcaaggggtacttccaagaggcgtctgaggcatccaagtatatctgggtgagggaggcccttcccccggatactgaacttgtgttcatctttgagcggcctaatacggcctgccattggcttagtaagcgtaaggatggcacaaagcaatccatggcggaatgggccgaacgtaacggcttccgctggtttactctagagactttcaaggagtccttccctaatgagtaagaagtacaatgaagacactctcgttatcgcggacactcaagttcgatccgaggttaacatcgaccacattggtaacctcggggagtggatcgcacgtaaccgccccaagcgaattgttcatattggggaccattgggacatgcccagcctgtctagctacgaccgtggtaccgctaagatcgaaggccgacgagtcctcgctgatatccaagctggtaatgatgcgatgcgagtcctgctcgatcctcttcgtcgcctacagcagcatcaggcgagttgtaagaaaagggtctaccgaccagaaatgcacttcttcatcggtaaccacgaggagcgtatcaagcggtatgaaaactctaaccctgctctccaaggttttattgggtacgatcattttgatctgtccgattggattgtccatgatttcctcgacgtgggtgttatcgaaggtgtcgccttcgcccactacttctacaatcccaacagtggtcggccatacggcgggagtgccgagcatcgcctcaataagatcaagcgcagcttcgtccaaggccatgagcagggattcaagtaccacatcgaggcagtaggaaagaagcgaatccacggattggtagtcggtagcttctatacccacgatgaatcctacaagggtcctcagggtaacgaccattggcgaggtgtagcccttctccggaaccacaaggacggggaatatgacctcaagctgatgagcgtggaggagttcctgtgagtaagttcttgccagacctgtactacattaagtctgagcatgacttcggtcaacgggggttggcgtttaagacgccgatctccgcagaactctggctggacatgaagtttgggaaagggggtgcagaggaggggcttaagcgagggatgtattccatcgaagtcctggagatcctctacatcccaagcgttcaccttccagatatcttggggtaatctatgaaagaccgagtgggacgtaagctagaggtaggggacagtgtagtcttcctggtccacaggaacacctcctcccatctagctattggtacagttgatgggtttactccgaagatgattcggatcaaatgtcctaccatgagttggactattgattctgaatatgtcctcaggagcagtgacaaggtggtgtactatgacaaaggctgaactggagaaagcacttgaagagacgcaaagcgctcttgcgaaggctgaggcgaaggccttttcctttgaagaactggctgaagaagctaaaagacagattgaattcctcgaagggatgctagacctagtagacctcagggcttctgtattctacggagattggaggggttatgcagaaagatcaaaagggtaagggtggattcccttggacctacattgcggtagcagccttgtttgccctgctggtttatgtagggtatagctgactgatgttactcctgaccctgggagaaatatctaggttactaatcgaagtgttatcttgggcaggttccttatgaagtatcgagtgcagcagctagggaagcgtctcttctacatacaaaagaggtttctctttatgtggaggactgttacggactcgggaggttgttttatggccttctactccttggaagatgctgaggagttcatccgggataacctaaagtatagggattctccagtctaccaccccgtcgagtaaccaaaaaaaaggccccaagggtatcatcccaaggggccttatctttagctccggagagcgttcagcagagtgttgaacttatccacgagggcctcgtgagtgtccgtataggaagccacggggatctcagatatcttatcctggatggaagccgcaatggcttcatataggccactcacttcgctagccttaggcttccagttacctggtttagcctcactagccttagcacccacctccagaagcttaggcttcccctcaatatcctcccacttcactggctcaaagtctttcgggccaatgacttgtcggagggtcccatcctcattacgaacagcaatagccttcgattgaataacgaatacactgttgccgtcgttgtcagcgatataacctgccataattaactcctaattaagctgctgatttgaaggtacccacggtaccaccgaagggatatacacggatagtgcattccccgaattgaccatcagtctccgtctggttacccttagcataccaagccttgtccggagatacagcaaacttgatcttagctgccgatccctggataaagtggaagtgacaacctggggttacatcggggcccagggtgacggtaatctccgtagtcccctgagacatgaagaaccatccagactgttgcttagtcagggtaatattctgagtaagctgctgggtattgacgacgttaccacccaggtgagtagtcacaaggcggggatcaaggtagttctgttggagagaaccaatgttctgcacaggaccacgcatgtcgtcaaactgctcgataatgtagtcaccaatggtaccaccattttggtcatctggaccaatcacgtgcttgatagccacataaacatccaggtgttcccgacgggggtctactcggaattcactaccgaaagcagtaccacaaggggcctcaatcatagtctcagagaacaggccaatcacgtggccagggtcacggttaccacccgaggtttcaccaggagcacccacaagggtgttgaccaggacagaggggataacggcctctgaggggttctccgggaaggaggctgtaacgttctctactaccagggctgcgttctccttaactgcataatagtcagggaggaactctgtagcggtaacgatgttagtatttacccgaccggcatccgaggtaatctcaatgagatcaccatcggcattacgtcggaagacttttggcacatcaaccacgtaggcacggccaccaggaccagcggcatcagtttctacataagttgccatattacttctccttaaagatccagagcatcttccatcgcttccataccggcaacgaaaggacgtgctggagtttgcttatacaagaacttccagatttcacctgcggaagggtcatccccgaacgaggcaatagttttaccaacagccatagcaccctcagttgcagcaccagctactggacccaatagtacctctgcgggggtagtccctcggcggtaacccgtaagcatgtcgtagatcatagaggcctggagtggcatctgttgcatcactacgtccatcatccgttgttctggactacgggtatcctctcggctagacccaccgaacttagccagttgacgaagctcatcctggagatacccaagactcatcatcagaccaagagtgaaggctacacctgcggcacccataccagcgttggtccaagaaccagcgaagtgtgggctcattcgtctacggaacatcggtaggatgatgttaccataggctgctggataacccttcaagagggagaacatctgaacgtttccattgctcatccacataggcttatcagcgaaggttgggtcgaggactacctgatccacaaatcgacgcatagccagagtcttgacgttgttagccatcaagacttcagatggtgtagctggggagaccaacttgagggcatcctgctggataccgatgttaacccccatttcccgaagctgagcaaccttcagagcaccattagcagaactgaaggggaggcctgcggctagatccatcaggttattctgatagacccgcttggcagtctctgttgcaaacacccggttaacatgggttagaatggacaagccgttgatgaggaactgaccacggattgccttttggacagtcgtgttaaatacctcagcaccaacccgatcggccatcaaagaggtagcagaggacagggtgtggttcatatcactcataaacctaccggtctcagattttggaaccccactgtagatcctacgggctgcctgtcttactacctcccccatagttggcaatacagccccaagggtaggcatcacccctgccttagcgaatggtaggctgaactcagttagggtagagaaccctgcgaggggtagtcgggagagcacgagggcacctgacgtaacagccgccagcttcttaaggttggggtctttgatacgaccgtgcataccattgtaggcatccactaggtcatacatccgatccacttcttccttagtgactctcttaccagcccgttgagcctcagctacagcagaagcaatcttagcgttagccttctccccattgataccaaacctctcggtaaaggcaatccggtgggaagccccctcgaagtaatctcgaatttcctggagacgcttcttaggagtatcgttgagagaatacttgttgaggatctcttgaggcacggagccaaaggcccgactctcttccagctgaccatacttaggtactgcatcactctgggcaaaccgtccacgtagagtatctggatcaccttggatacgatatcgagggtctacttcccaagccccggtctgctggttctgagtaaccagtcggttaacctcaggggcagtgttaccacgagtatcatccgagacttccgccagccagttggctacagcatcctcagcagcttgacggttctggaagtacggagtgatgtcgttcaggaactcgggggtctgaaccttctctggggatagaccgaatggcatatagttggggatagtaccaacggacattccaccacggttaacagcctcattccgtacgtcatccatcaaagcacggagacgggtagcttctggggtattgacacctgcggatgtatctgagataatcctgtcgatctctttcgaagacttaccctcgaagatgttatcgagttcagagttccacttacctgcctggagttcctgatcctcaaagatagtcttaccagaggctcgcttaccactcatgtctgccctgaaagtctcagagaactcgcgggcgataggggaggccttagcaagtggctctagaagggacgtagcttcgtttcctagggcatcccaggctttcttgaccgtacccctaggctcaaactcagaagccttaggaggggcctcaggggcgttaggatcaaccacagcagatccagcggagtcctgatgacgacccagggtgtccaaaccggaggatacagcaccaccagcagtaccaatagcggtaccagtgaaggcagccgtcaggaggttatccatgaactgctctggggtttgtacctgccctactgcatcataagcaatagtatcctggagagcctgttgagcaccagaggttacaccttcagccacaccagagactgctgcatgcttaccagcctgggtaacagcctcgatagcggtttgcttagggagtccagactgaaccagcatctggtatgccccgtccttaccgatgtgcttcaagagagggccagcgatgaccccagcaccagcggtatccagggcagacagtccagcacccccgataactgcggtccagggattgctttggtctgggtctagctccttcatctggttgctcagggcacccacgttgatacccatggagcttaggaaggaaccaatgagcgctccacccatacgacctggggccccaaatacagagccagccttagcccctgctgcaccaccagcaagtacaggggccatcgaagggagagcctctacaatgttattcttgaggaacgaaccgatggatgggatatcttggatatcagcgaaagaccgaacatcaggggttccgtactgtgacgcttcctgagcattctcctcggccatctgtgtgccgtagtctttcaggtagtcactgccagtcagttcaccaagggtagcaatggtaccaccgatgttagactgcatggtatcaaccccgcgaccaatcgcagagctaatagaattagggtcagccggagttactagggcactcaggtctggggcaggctcaggggtagcaggggctacttcctggggtgcctcttcgataacctctggctcattcaaggaagccaattcagcggctacgtcgaggcccttgacctcagccagttccgcatcaatagcggccttcagttctggagaaagagccataagtcaccttctagttgctggaaagagaataggctcttaagatgtatcttaggatactaaccttcttagtaagtaagtcaaaaggaagaaggaatcttaagagcctataggtctattatactacattttggatactttgtcaagtaccttttatcgggttggagcaggatagtccagatcaccaccaaagaaccagttacccgtaggttgaagcttagcagcctcccgctggataataccaatagggttagccccagggttagccctcatttcgttacgaagggtctgagctatagcctgttgggcagtcttaccaagcttcttaccacccagggcctgagatccactgacttcactgaggatgcccaaggcatctttggtagtaaccggctcacctcgggctgccttagctgctgcctgacgtgcctgagcgctaatcttagcagtcttcagacgtacagcagaactaagctgggcattctcttgagacatatcctggccacgacgggttgtttcagcctgtagctgagcccgttggttagccatatcctgtccacgctgggttagggcaaggttggctcgcccccgagcagcctcctcagcccaccgatccagaagaccagtgttcttacgagaggtttcctcaagggtgcccttcttgacctccaggttcccttccccaagacgtacatcagcagcatccttagctaccttacgttccagatccttttccttgatctgacgatcagcagctgcggcagccatcttctgctggttgatcccagcctgtaggttacgatccagttgacgctcataggaagcagcgaacatatccccggctttaccagtcttgtctatggccgaagccagaagaccagtaccaatgagagcataagatacataacgagacaggtcatcattatccatagtcctcatctgggtcaactcttcgttcacccgattcttaagctcttggggtttaagctctacaccctctctctgggcatcagcctcaactacagcctgggccatttcaggacgacttacagcaccagtacgaagaccctcagctgcaccctgttggataacctgacgattagcctcctcctcatctgctacagcagcaccagcctcggaagccacctctggggtgatctcaggctcgatagagggttggttaggggttaccccataggacaggagttcagccccagtagggcctcctgtggcgttctgggctgcacgttggcctacaccctgggcccattggtttgcctcttgagcaacctcaggccccatattctccacagcctgactagcctgagccatttcttcagcacgagtccgttctgcatccccgagttctcctggggttacagcagcttgtatacctacagatacaggaccaccgaggatacctgcgatacgacccagggcaccacgacccgttgcttcagccgcaggggctacctcttgagcagcccgagaccaacggtcagggttctcaagggcagcctgagcagcacgacggacacgatcagggagtccagagccttctacagccagcggcagtttgttccttgcgattcgcgccatatccagttcattctgagcagcccgaaggatgctagggcgaattggggacccttcataagccatgctggccataggattaacctccaaatagtttacttaggattccagacttgggttgctgtccgaaaccgagttcttctgcgctaggaagaatgcccattcccgctcccatacctgctgcaacttctgctgcgcctcgttcgcttgctcccctagccccttcgacagaaaagcttggtactgcttctgaagaaggctcacttccttgcccgaggagagccgcgagtgctgctccgcccattgcgccaaaagggtttgattgtccactagactctcccgattgcattgtcccaaggtgggtggggcggtaggaaccttgacggctcaactgtacccgctcctgcccaccacctatattctgtcctatagcgaacagcttctgaggaagggaggccattagaacagaaggcccccgaccctaccaccagtattcataccaacagaagcacccgctgggccaccgaagagagcgcccaaggaagcaccaccgagagcacccagggcagacccgaggccaccaccaccgccaccacccgaggaggtagtaacgttggttcctcccatgtcaccggagataagctccttgtaggcgagtaggtcgttaaggctgacgttattctcataggcccacttctgtagtgccccattgatctcctgctgctcctgattctgaagcatactaccagcatctacctgcatggcattaccagagccgaggcccttagcaatagccgacaggttacccagggtattcaacctattctggttgtaagcctgctggtcttggaaagccaactgggaggcgttattctgttgattctggagcaacctagcggtagcaataccttctgctacacccgctcgggaactcccatactgaccagcattagtggcccctgctcgcaggtctgggcgtaccgtagtgtcgaagtcccattgcatctgctcgttggctgcaccaatggcattcgccaagccagttttgttgggatcgtaaggaccaaggtaatcagccaaagagctaacacctgagctacccaggagagactgaagggcacccccgagaccacccaacccttcgatgccgccaagctggagagcattttggtcagccaccgggtcgaagttcggatcacccccatagttagggtcaaagcccccgttatgtagccaatcactggcacccgagagtagttcattatagttaccttgctgatagggtgtagagacagaggtggtcttttgcttcttactaccacccttgtaagcccgagaatctagggcatcctctacatcgaaccccatcagacgctttacgttaaattggaggaagttcatctggagttacctcacgatagaaggatacggagtcttcggtgtacccgagtttctctagggtaggcttccagccccgacgaccttcgcattggataaaccgacagttaactcgttgggcgaactgtccgaggaagtcgtctacctccgagtaatctaccggggtttcattcccaggcatcttaccactccagaagaagtgaaggatgttacccaggggtgcttgggacacttgaattacaccagcgtagccactctcttcctgatagaagacataggcttcgtagttaaccaaggagtggaccaagtgttcgaagtcccaaaacttaccgaggtccgtcctattgaaggctcgggccagagcagggactacggtaggaagcagatcgatattctcacgagtaatcaaatgaatcatggagtcaccaccagggggaatgtgaatgtacccccgaagactgctccttggggaattccttggattagaacacggccattagctgtgatcttaaacattgcttggttaaccaccccagtctgaatagtagccctgttgagaacatcaaagacttgatccaacggaggtgcgttagggtcagacggaggtggataagtaatagtgctctgcgctgggatgatgctggaataggccgggataaacaactcagcagggggccaatacgcctggggaagatccaggacagtagctccattagtgtagttaccaccagacatgagcatggttatccatacttcatccttagcagtgttcatcctataggcacaggtacccatcggttgatggttgttctgtggggtaaataggataaagtcccccggcaggtccttgggtttagtacctgcgagtctccattggttatccaagtcgtaatgatagatgccggatactggacctaccactccgggggcaaaatactttacagtccctggcttgagcttcttagggggctccatagagaccccccagtagccgtcagctaggtcattaagagtctgtccaaccctaacgaattcttcattaaggaagggcagcagttcctcctcttcctgtggtggaatcgaagggctgtacttttgactcatcgcatacctgccttcggggccatttcaatagtgtacccattgaagtaccaatccccctccgaagagaagtcgaacttcaaggctatataccggcccacatgtttagtgtcaatcttatagtcctgaccaatccggtatgggtaagggcctttccatcgaataccagaaccttgtacctgagcgttacccacccagatgttacaagtaccgttaccagtaatgtgtggaatgatggcactcactgtcttcatcattcgatcatccccgagatagatatcggatctctcaagggtactgacgaagttctgtccagagaatgtagagttattaccgaagaggaacaatttcttatcctggaaagatgagaagatcatactggactttgctgggttataagagccttcaccccagaccgaagtataggtatcccaggggttggggtcgtcatcccagaggttagacaccttaggatcgatgatcccgtaggctccactgagaacgttgggaaggtctcggatactccaagtgttttccttccagttccagatgatagccctatcgcagtgcttacctggctcagacctagtagaagagtagcatacccacatttcagtattcacgtggtctgcaattacgaaggtccgttgatagttgtcagggttaatatccgagaagaagaacttacggacctgagcatcaataacagactgcttctgcacaccgttgtggacatatacgtcaccgtggcctactacaaagtggttaccatcgaactctattgcacagttgggtccgaggatacctacgtcgttaaacagctgctggaattggaagatgaacaatccaccgatataccgcatggagtatacagagtcttccttgtagataatgaaggagtcacgaagcttaacaccatctacgatggcaccattggtatcagccaaggtgttctgaccagcatccttagtagggtccgttgggtcccaagatacaggaatacccccagcatcagccgaggtactccaccagaccatctgtggcatttctacagagttctgggttacgttcaaggcaatcataaagttcttgaacgacttcattcgtttagcgaacgtgttagccggccagttaggcatgggaatgaacccactattctgtggcatcaacacgtaaggatagttgcttgggttgttagcaaagatgacaccattgaatgaaccagaggaccatctactggttacacttgcagagtgtccacctggggatacatccacaacggtagtaccatccgccaagtacatacgctgttcgccacacaggagccaataggggatgttattccggatgaaagggaacatatccaagattggggcctgggctgtatcaaagataggcgtatggcccagagccttctgagccttgccgttcttaaaccggacgttgttcccgaaggaccatttctccagtggcaggtcagcgggggcgatatcggtcacaatccccgtagggttcttgacctcttgtctctctagggccattgtatacctcagttcttaatgatgaagaacacagaacagaacggtgggatattacccaacggcatgttgatctttactgcatggttgtgagtctgaccttgaccagcagggccagtctcaaggttggtattggctgcgttaccagagccacccgtcagagcacccgagtcacccgcagaaccggtgagggtagtagcccctcgggatctccaagtgtgggtatgtgctgggatttgggctagggtaagggcagtcccttcagtgaacccatcccatacaatgttagcgctaccgcctctagtacctacagcctgggaagatccgtcgataccccaggggaatgcaccaatgaggttggggacggggataccattagaggtagtccctacaccattacaaagcttccaacctgctgggatctgagccagtgacccagcccacatgataaccatcccaggtttaacatactgggttgtatcagcgactgcgtttagctgggctgccgttacagtgacagcctgagaaatattggggaaggtattcttaatagcactcttaatgagtcgcaggtggtcatccccaaaggacttcagatcagagccggtagggttcgtaggcaccaactggttaatataagttgcgacctcaagacccattcttggcctcctttatctcttctttcatttcttttcgggtgacataccgctccccaaagattgccatagaaatctggagatcgctcaccgctttggtgagcttctccgtggcctggatgtttctttcaagcagagcctgatgaacattctgaccgacaaccgaggaacctaccgtcactaccgaggatacgaccagggcactgacgatgctgcccaggttatcagttagaagttgcatcctccgtcttctccttaaggttgtcttccaggacttttacgaactcgtcgtcaaccttagagttagtcttctccgccagggccttagcaccagtcacgattgacttagcgattaccttggttgggaagagggtagccagaaggttgattgcgagggtttttagaaagataggcatctgaagctccttaacgttcaatgtctttgatcgccagtcgagtgctagcgaagtcagcggcattctcctcgttctggagttccataacagcccgttcgagtttctgaccccagaactgggaccgagcttcatccatggtgtacagataaatctgctcaaggacaccatagagataaatctgcggatacttcgtcagagcccaagtcgttgggttagcgaggcttagctctgggagtacagtccagtagttcacaatgaacggggcaccgtcaggaacaacggggaatactcgccagaagttacccaaccgagtgtagtaggttacaccctgaggttggtagttatagttaacatagtgggtgaagatatcttgggtgatgtactgaagagtacgcccaccgataagagagtcacccgtgatagaccttagagcaacaaagtgctcagggatctcaatgccaccaccgaaggccatgagagtttcgaagtgttcgttctccctcactcgtagcaatcggttaagacggtcagtagtgttcccaatgaacaacatcagaagttcttgggtaagatcctgacggtcagaccactggatagcagcaatagcgagatcagttacgttattgatcgtagccattcattacacccgtgcctcagaggtccgcatccgatagttatctcggtcattaagccaacgggtaaatcttgcggcatggtctgggtcacaaccaatcaggtttagatcgataggaccaccttcagccatgggacgattccgtagtgcctctacgacaaccagggggatacttgctaccttgcgcatattatccttgcggttgctattgacacccgagtggcgctcttcggcgttagcggacaggattgactcaacatcttgagtatcctttcggataaagagcccaaggtcttcgtcaattgcataagtcgattggatactcatgatgtacctcctaaggggaaacaaagggccccgaagggccccgttgggttagacctgggctacaacgtcgcggatcagagcaccggacttctcgttgtttacacgcagggtgtactcaaccagcagctggcgcttctcgctgtcaccggtcttagccagttcgtgctggaagaacggacgcaggtagcagagggcgtgcatcttcggatcaaagatgaacatggtgttttcgtggaaccagcggttggcacgaatggtgtacttaccgaagtcactctcgtagacatccacggtctgcgcaatgcggttgtccgaggcatccagggtgatctcagttgcacgacccttcatgttcttgctgatggccttcttgatcgagctcgaagtctggatcgagttagcctgaccaccgttgcgccagatagcctcagaggcattcaggagcatgtcttcggtcagaagacggaggtcaccagcggtaccagtgtcggaaccatcaccagttggcagggtaccgttagcacctaccgaaccgttggtcttgtagtaggcaaagatgtttgccatctgacccggagtagtggtgttacgctggatcttagcctgaggggcaccgaccatggcgtattccatgtccagcttcagttccttcgacttcttagccagctgatacgccagttcgttcttacgaccagccttcttgaccttatctgcggtaccggtgacttgcagggtctcgtccgagatttggcagaagttgttcagcatggtggtgaagctaccagccttgatggttgcatcctcaccttccactcgggtgttcttacccggctggcggagttcatcagtctgccactcgtgggtgatagcggtagctacgcccttgccgatagcagtcatgaacggggtgtcatagggtgcgatgttgtagatgatatcgataaggtcttcgcgcttaccgttgatctctacagtcgagacggcattagttggagttgccataagttacgtttccttctattagaaaatatcgagagaggagaagagagcagcagcggcttcaaccgactgatctttcctcagattagcgcgggcagctttaacccgcttagaaccctctgaggcttccgccctacgagcagcaggtttaactgcggcaggtagttcagtctcctccttcttctctagggcagccttgcgacggacctgagattcagcccacttacgtgctgcatcaagtacagccagttggcgggcatcagatatccctcggatctcatcctcggagtatccaatcgatttgccgtaggacacaatcttgtcaccccaagactcatccgtggtcatttccgggataagtttcttggctagctctgtctgacgcttaacgtaggcagagtggacaatctcggctcgcttatcctgcatagccttaatgtcattgcggcgtttaattaaggcctgggctcgatctcgggcttccagggcttccagtcgaagattttgatacttctctgggtcctgggccttaagctgctcccagtttacattgtcatactgattagcaccagcaatagcggtaacagcatactgctcaagctcggccagtagattagagcgttcagcatcaagctcttcgaatttagctgcatactgatcctctagttcagcttgtcgagttacgaactcttcattgcgaaggtagccactcttaagctcttcgaagttaacctcgtagacttcatccccaatcgggatctcgaagagtttatcctcaggatcttcctcggactcaacctcgggatcttcctcagaaccctcttcttcctcctcggactcaacctcttcggtgtcctctggagtaccttcgtctactacctcttcctcctcttcttcccctacgactttaccatccacggtttcatcaccgggggccaggaggtcatcacctagcaaatctccgaaggcttccgctgcctcgaattcatccatgccttgattctcaaggtccattacttatactcctttagagtgatcgaatccaagattgcctggatacgaagttgtacgcggttaagggcgtggagctcgtggtatatcgcctcccgagtctcactatctttgggggccgtagccttccattcgccctcgatctcttcttggacaatacggaaaagctcaggaagaacgttctcacgtaccatctgttgtgccgcatcagtcagcactagactatagccaaaacgttctcccaagattatttcctcactgccttagatggcttcttagtctcaggtactttaccgtctccgatataagcagcccgagcctgagtagcctcaagatgatactccgcttcgttacgagcccgttcccaagtgaaacgatcacgctcaagttgtagttccgcttccttaagggccatttctctctgctgaaggacagcctcttgcttcttcagttcgatctcagccagtcggatctgagcctctacctgcttcatctgggcctccgcttgcttagccaaggcgtccgattgggcacgttgggcatcagcttgggctttgatatcttcaggcttaggttgtgcttccttctgctccctgatggccttagcctgttgagcttcaggagaatccgggttagtccagaagcgatccgggtctttatacccagcgttctctgtgacttccttaaggatattgtaaaggttctgctcagagactaggaccccaagaccaccaccccctactacagcctgggccatttcccagatacgcataaggtggagcatctgctggtctttgttcatgttgccaataccaacggtaaccgtcaggtcggatctctctctccagttggcagggttaatagcaacccacttgcctcgtagctggaagacctcttcctgattctggtacttgatggcatggtcatgcagaagttggaacaaacgcttaacaccagtctctgcaaacatccgggcaatcaggtcaatctgttgctcagcagcagtcatcaactggttaacactcatagccgcttggttagagtgcagggtgttttggtctagtcctcgggtacggtcagtgatacctgtccgcttacccctgtctgcctctagacggtctagcataccgtagacttccccagacagctgaggggtctccagaggcatgatagagttcatggccttaacccgaacgatacccgctgcctcgttggtcagcaagtcttcgaggttaacctgtccatccaggactacagatcgcccttggttggtccggtagatgttatccatgatgttgcgcatgagcaccgaacggatctcttgaatgtctcggatcttatcgtagacactcatcccgtggaacttatgggcaattcgataggcattcaggtcagcgaagggacggcaatcccaaggctcgttgctgatgatgtagtcgcccacgtacaggatacggcgcaactcagagataccatccccatctacgtccagaagggtgtagcactcagaggcccatacctcacggttggcttcagcatcatccccagagttgtactggagttggccagtcatatcgaagttatcacgtaccaacctttctggctgactatcagagaattcatactcatcgtatggaagctcatctagtacatcctcgggaacacccaagagcctcaggtcacttacggtatacttctcacggtgacagaggaagcgtgcatcatcaatgcaggtagccaatcgatcaaccaggaagttctcaggcttgatacaggtgactttaatctctcgcttcttcttgtccttgcgaattttaatactgtaggttccatcctcatccacactctgtgctagaatctcagtgtctggatcagccaggatatccgctaccatttcctcagagagaccagagaatcgttcgaaggtaggattcaggacctcttctacatagacctttacaacaccggtcttcatcatcagagtgtcttggaaccagtcgaacattaccttgaacccctcgttcttacgcatgaagaggtagttcacatactcagtctcttgctctgcctgttcaacatcttcggcagtctgaggttcatacttaactacttgaccgcctgacgtgaataccttcataagagaaggcataatccagtctacagtctcttgaacatccctagatacaatcgcggacttacccggacgctcattaccgaagggctcaccgaagtaatacttcagggcttcagagcgttgtttagatagttccgacgagttgaaatcaagggcgtcgttaacaagttggtctagatgacgaagtacctgttcatcatccataggcttaatcttgcgacgacgcttagccattagacaatactcccaaaccaatcaggggtcaactttgcagtatcactcctgtagtatccactgtttcgtacagcaccaggacgtgcatgccgggaagccatcaacagggcataccgggtagcggatatcatatcgtcgtttctgtcgataatctttccgtcctttcggtggtacattttcatttcttttaggaagttcgtacacgtattaaacaccttcagatcaccattctccatacgggtcaacatccagttaacgccgaactctacagagttacctccgtgtttaccatcaggacccggtgggttactgaagggctcatacactacattgaggttgtggtcatctttaagaaggtctacgaatctacgaccagaggttgctccatcgtgcttaaaggcatcgtgggggacaactaccgggatctggtgaccacccttcaggtagatagcatcagcgtgcatccccaaggtctcaccactctcacttctctcatcatagaggtagtatttgtctttctcagggtcccaggcaacacaggcgatagcgttagggtggtcaaacccaaggtcgataccgatgatcctatggaagtgatcggggatctggaaaggctcacatacaaacttctcttccagaatggggaagactacaccagatccgagcataggaacaccctcggccctcatcctgcgttctgctggagagtatacagagagtagctgctctttaacttctggactgaggtgtggggcgtcttcccagcttgcatggacaaggaactgaccaggtttaagatcctggaggaagtccttgacgatctccgtcagaccatgctctggggtaaacgtcagatatacaatacccccagtagtagccgttcgggttacacactgggtataaatatccttggggcattcctcatcgagccagataacgtcgatggcagtacccatgaatttgtcctgggacatttcgtaggacttgaagataagggacgagaggcccccggaggcatgcttaacaactactgcttgcacacatccgggtttaccttccctacgaatcgtctctacgatatcttccttggggatcatccccgttccaaaagcctcagggttcttccagtcacctagtagttcggactgaagaatatcccgagtggtatccgtggagatccccgccgcccagcagttcactggacgatcatactttctaccagtccaccactcagggtagcgaccggtgaggtggcaggccatgataaaggccccggtgtaggttttaccacagcggttaccagtcatagccagcaactgggcgcagttcgaggaagctgcgataaacttctcttgccacccataaggagtgtactggttcatgcggaaatacttctgccgctccgccaactccttgactagattccgtagccgctcttgggtatccattagaccaccttgtcacctactgttgatgcacgccacagggcccgttggaggtcccttacgcgcactggagtttgtttagcccagaggctatcttctgcctcccatgcagcttcatcaaaccttccggacttcaggagattccacgtcttggggaacttcttcgtccacgctgtacccagctggaagttgacgctaacgagggcatcgaatagctctggagtgcaaaaaggcagctgagatacttgcccttgggctgcatcataggctgccttactatcttgctctagccaagtctctgctcgtgctagggtaatcggtccgtcttccccagggagttgcaagtggccataaccaccagttatcttcccgagggagtctttgtaccattttagtaccaacccctcccttcgcttgattagatcaaggtacttaagaggctgggaaagaaatgactttagccaactctggctcttcgtcgagaattcgtcgaacttcactgattagatcctctgcggacatatcttccacattcttagtagtaagctccagtttctgcttagctccgaagcctccacgatccaggatatcctgggccgccttgaggcgaatcccacctttctcttctgggttgctagcgatctctacaaccacacgaagcgccatggggacatgactcccgatgcgctcagagataaaggcgttgatgtattcggcatgctttcgatggtatgcagctacgttgcgttgcgcatgattaggagagaacccagcggctatatatgcttgggttttgttcataccatctgccagagcctcacaatagaggtccagcttttctttagcagaaagaggagcagccccaatcgagacaaccttttcgtctgacatacactgctccgatctctctaaatggtcaccccggtaggactcgaacctacgacctcctgtgtccaagacaggcactctaaccaactgagctacgaggagttaatggtggtcgaaggaaggaattgaacctctagcctaaggcgtccgggttacaaccggatggtagtagccatctacctctacatcgacctctgttggctgggacggcagggctcgaacctgcgacctgagagttaacagctccctgctctaccaactgagctacatcccaatgaaatcttaaggtaatttctcaaccttataatactattatatcatactttttctattttgtcaagtcttttttcttctttttttattttagtcgcaaggcccggttttgttagggtttttgctggaatgggaaaggggttcttaagactatcttaagataaccttaaggtaactaaccttcttagtaagtaagtcaaaaggaagaaggaatcttaagagcctataggtctattatactacattttggataccttgtcaagcactttttgatatttctttgataatcacatgatttacccgacgaacggtatgatagggttctatagatataccctaagactacccttcgtaggttgctggtaaggggtaagtggcatagggttcccttgatccaggttctataggtataccttaggactacctctgtttgctatgtcctggcctattgccccctatccagtaatataccaacaggtatcgggggttgcctttgatccagggcctataaccgggggataccccaaaagtctattttatcctccggtgtatctggggaatatccccccaggagtcccccagataaagtgggggtggcctatccacaggggtatagcccctagcccctccctaggataccatgggattagtccgggggtcaacccttagacccttgggctaagccccctagagctaccgttcatcgggtggacactagggtattcataagaaaaatcttagggtattcaggaggtggatcggggggaat

SEQ ID NO: 69 - DNA, 46515 bp, synthetic construct
  source 1..46515: mol_type = other DNA
ccccaggagtcccccagataaagtgggggtggcctatccacaggggtatagcccctagcccctccctaggataccatgggattagtccgggggtcaacccttagacccttgggctaagccccctagagctaccgttcatcgggtggacactagggtattcataagaaaaatcttagggtattcaggaggtggatcggggggaatatcccttgataaccccttgaccccctattgacttccctcgataccatatgttaatcaaagactgtctatatccgggggtttgctgaagactgatagtccatagactgtataaaaaaccagtagacaaccccgtaaggaatatggcctaatggctccgccttgaaggaaaccgacaggcaacgggggaaacccctaggggcttgacaaaccccgcggaacctggcctaatggccaccacgttccacctaggccaccatcctccaagtctacggacattaacgggggctgccaaccaaaggggaatgcccaagtcacccaagtataagaccggcaggcatcgggggttgacaagggataggggaagcggtaagatggctcccaagtcaacggcataacgtgcatgactccctcgggattagcgtagccttgacaagcaagactgatggccactcagaaaaagagcctatgccggagaaccggacgaactaacccccgtcagagggttgacaagccaagcccgaggctctaacatgggcacccattaggtgacggccaccttgggaaagtgtaccttcgacggtccttggactgaacaagggagaaacccgaaagctgggggaataacgcacactccggaagagcgtaggttctggccttgtaccatagaaggtccgactggttgcctgctccagcgtaaacaattagcagagttcccggtagaatcgtggggaacagtatgatgggttagtatcgtcggcttagcaacgagggcgaagcgtggtagatactggcgaaggtaggggcgagggattcgaagacccccgaggatagccagaggacagaccacaacgaggatactaacgcggaaaggggccggctacgccaatgccaaggtttgccgactaacccctttatcgtatcgtagtgtgtgctacggctgatgattccaaaaggatgaaacgatgaacgctgctctggataagaagctgcgccgcaaggctagccgcaaggctcgtgctcaaggtctgaacattgggcatcttggcaaagctcagcagcgtgcagaacagaagttcgggatcatttccaattgtaacaagatcctggatagtaagtttgcttccctacaggaaaaggccggggcacgcaagcgcaaggctctgatgaataccgattggcgtaaccgtgaggatactaaactgcgcaattggtacaagcctagcaagtgcaagaactcccccgtcacccacatcaaacccgaggtataagttatgagcgactacaagcgcatcaacggcatcatcaagaccatcgcccagcgtggtgcgtccctggataagctgatccaaaccaccggcctggatatcctcaagcatatcgaagagcacggcgaggtttcgctggcatgcaagctgttcaaggccatgccccaggggtcccgtcgcaacgccctggccgcgtggttcatcgaccacggcaagatcgaggccaatatcgacaaggaaaagtccaaggaattcccgttcgtcatcgccaaggataaggccactcgactggagcgtgcagccgaaaagccctggttcaagtacaagaaagagcgtgacgtggccgacgagttctccctcgatcaagccatcgccgccttcaaggccaaaatccaacgtgccatcgacaagggccagctccaggcagctgacgagcgtatcgccgtgatccaacgtctggaagtgaaggacgaagcgaaggcagcctaacggccagggccaggggtgtgtactatgacgcgccccttggttcctccctagagtacatggtaggtccgtgtattgtatggatgaactaaccgaggataaaaccgtgtggaccccttttggtagctttctggtagctgttacaaacgattacgtgcaaggacgttgtaactcccgttcgtataacagcgatgggtctgagcaggtagtgtaccgttgggctttcgtcgatggtaagttcgcctgcggtgtatatgtagatggccgtcccatgggcttctgtgggtggaccaaatgaagtccacctacgaagctgcccacgaacgtgccctcatggttaatcggctacagaagctaaccagaatgcttcgtgtccaccacgaccctaagtggaaacaggaacaacaggaacttatcaagaggttaaggcgatgattatctctatcgtggtgtcttgcgtaggcatcgggtacttcttcttccgtgactggaaggaggagatgggtatcaactgacccaactgatgaggccatggtgattcctggcggctaaggatttaaggtaaggaggtttatttatgcaggataaaaagtctaaaagtaagactgccaagattgattggtctcactggacagtgacggtccctgaggagaacccggacaagccaggtaagccgtattcactgggttatccggagattctcaattatgcagaggacaaaatcgcgtcaaaatacatgtacgacgatccaaaggacaaaagtgtcgtgttctacgcattcccgtccggcgtgactaccgctaacacccattacagccggtcagagttacgggaaactatggagaccgggtcaaacaaagttaactggaccttcgctaagggtggcaaaatgcgtggtacttacgctatcgacgacatcagcaaagagccggatggtaagtattcccgcgtaattatcgcccaaatccacggcgtactgaccgacgagcaacgtgatcttattgggcaaaaggacaataatgcccctccgattctcaaggtgtactgggataaaggtaaaattcgggtaaaaacgaaagttttaaaggacctgaacgccccttacaaagagatgcttctggaacacgcttggggtgatgacgaaggccggaactttaaagagaagattgacttaaatacacggttcacattggaggttaaagtgagcgatgggcggatggaagtcattcttaacgacaccgaaagtttggtctatgacgacattcacatgaaaaaatggggcattttcgaaaactactttaaagcagggaactacttccagtctaaaactccgggcacttttgcaaaagttaaaatttattcacttcaggttacccactgaacgagaggtttaagatcttgggaaatcagcaaaggaaaccatcccgtgaaacgcaacgactatcgtaaggtcagccgcaacatgcaagccatcgaggctatcgaccgcaagattgccaaggtaactcgtgagttgaccaactccagcggcaatcaccttggtaaaaccctggagttgaacaaactccgtgccaagcgtgcatcgctggctaagaacagggcgcggtaatgtcatggaagtatattgcatgtgccgccatacgctcacgttccaatgggttgttgctggtagcgtgggtggttctcttcgtcctgtcctcgaccttggacagcatcccttttgcatcgtgaggtaatccgatgaagattaatgtggtagaaaagcccaagaaggttccggcgcataccctcaaggctacagatgttttccgtgttgagaacatccatgggatggtacttcgggatgaccacaaccactacctccccaatgacggcgatgtgtacttcgtttgcctggaggctggtatcatttgcagcatccatagcgactgcgaggtcatcccggtggacgctcaaatgaccgtgagggtctagtgtactatgacgcccgccctgtatctgctcctctggttggaatccttggtcagtatccgcaggttccagcctaaccacaaggcgtaccctggttggtacgtcacccatatccgtgtgtctatcttcggcaaacgtgtaggtatcgtctatgaaatccactaaaccgcaagtcttctggttggtaagcaaggatggtgagcgtcacgtaaaggtcatcaatttcggccagttcatcaccgaaaccctttacgaactcggcattccggtggaccacatcgttcatcgggttcagtaaggtgacgccatgaccaatacctctttcaccgtagcagtggcaaagccaaggtttgagttccacatcagcaagatggcggacggtgcctacgtccattcgggtgattccgggtctgtcgacttggtttacctcaagaaaggcgaactcgtgaccattattcacaaggatggtttcaacatcctcaagtgcaaggaaatcggtactcaccctgatctattcccggccaagtggttgtcggtgaatgcctgcatgtgggggccgtatgaagaataaacccatgataggccagataatggcccaggagcgccgcatgaagcgtcgggtagaaaagcgggggttcaacatgagcctccaggaaggcacccaggagccccgtggtgagcttggtttcaccttggctgccgtaggtatggagtcgagccgatcggcttaccttcggcacgccagggaggccatgatccaatctggtgagccttgccctcattgtatgccaatcttcggtcccaaagagggccgttgctgcaactgcgcgagggactggtgatgggccggtcgaaacacctcacgttcctcccgtcgaggatcactgtccttgacgatgatacggtctatgtgccttggcgataccagttggaatccctctacaacatggcttccgctggtggtgctactgaccccgaggcagtcaagggtgaattccttgattgggtacgagcggagtatgggcgatatgtgtccatcgagcttgaaggaatacccgaggacagggaagatgccttcgatgagtatgtattgaaggggtctcagcaagggtaagcaaaatgatgacatacctcctgataatcccagcgatcctgatctacatggccttctccttgctcgtggctggcatcgccgggctggcggcaaactgcgatgagtacgggaggatgagccagaaggaccaggacgtttcaatcatcctcggtatcctgtggccagtgtcactgccctggatgtgcttcatgtgtgttatctggaaccctttggctaccaccatccgtgcggccaaacgactaatcaaaggagattactaatgcgccgtatagacttcccttcctgctgcaccgccaagatttacattggcatgggcccctcgggtaccgctgaccaccgagccggggaagcgtccaatgggttcagcccccgtggtttcgccaaggaattgatcggggtcatccgtcgcgagtacaacgaaggtcatggcaccgccgtgttctccgtgaacaacgagcaggtggtagccgataccatcctccgcagaatgggcagccactacaacccctgggcctccagctacaaccactcgacgaaggttcgggttcacgtcatcaacgtgcaagctgcggcagaaatcctcatcaaccacggtgtcctcatccgacgactcggtggtttgcaggactaccccggtactgtcgagcactcggaatacctcgacaagctctgcaaaggtctgtaacatctaggccttgacattctgctgaaagtgtggtataataaccttaaggtgtccggggttgctttatatccctaggataccttaaggttctaaccttctatcttcttcatcttaagaaagaggtaagaacaatggtcctcaagctctacactcgggtaatgctcctggctatccccgcatggataagcatcctctgggtagtaccacagatgctgtccccggctgacaccatggtaaacgccattggtgctgccctcctggtaatctccatcctgtactccctctgggctgtcagtcacctgtactcctacgcaagtaagctctctggaaagaaggaggtgcatcgtggccacggtaacgagaagcagtaaggtcccaaccagccccctttacttcgaacgtaagtgtgattcccagatttaccttcgttcggaatcccggaaggacctcaccatcccgatggtaaacatctgcaatgggagtgtcctgtacctacaccctcgggaactccccgtgtatttcgtggcgatacccgagggtgaaactctcaaggtgaaggtgtgatgtactatgacggaacagcagcgagaccgcctccgtaaggcaatccacatggatctagaaggtatcggcgaagatacccccgacctctacgacaacatacataagatagaaggcctgcttggccacccaggtaagcccccgcatgattggggcttctatgtactgatgttcgtcatgttcatttccttgtgcatggtctacatcactccccttctctacaagtaaggaatccctatgaagaaaatcctcggcctcctggccattgctgccatcgctatcaccgcaggttgctccaaggttcccgctggctataccggtgtcgtcgtcaacatgatgggcgactctaagggcgtcgatctgaaggaaaccccggtcggctggaagttcctgacccccaacgaggagttgttcaagttccccaccttcaaccagaacttcgatctggcggtggttactgcccaggacaaggacggcctgaagttggacttccccatcggcgtcaccctccgggctgctcctggtagcgcacccctgctgttccagacctaccgcaagggtatgaacgagatcgtaagcgtgaacgtgccgcaggtggtccgtaacgccgtgaacaacgccagcagcaagaagtccgccgaggccatctatggtcctggcaaggaagcctttgtcaaggaagtcgaagctgccgtccgtgagcacttctccacccgtggcataatcgtcgaaagcctgtacctcaacggtatgatcggtctgccggcgcaggtggtcgaggcgatcaatgccaagatcaaggccactcagacggcgatgcagcgtgagaacgaactgcgtcagacccaggccgaggcagccaaggctatcgcggcagccgagggtgaaaagcaagcggctatcctggtggcacaaggtaaggccgaaagcctccgcatccagggtgaagccctccgccagaaccccggcgtggtagaactgaatgccatcgagaagtgggacggcaagctgcctacctacgtcaccggcggccaagccatgcccttcatcaacgttcgctaaggaggtggacaatgggtaagcgtaaggttttctatgagcgtatctgctccaacggtgaattgaccctgaacggcaacctcaaggccaccaaggtgtcggcacccaccaaaggcaagcagcagcgtcgcggccccttctaagagggcgttagtaatgcccctaggaactccctgggggtattgctggctaactcaatcaaggagaaaacaaatggcccgtatcaagtacgccttcggtatgaaatccaagaagggcggggttaaggccctcaaggtaatgacctctgcctcctgcttcggagccatggagggggtggtaacccatggttataagctcgacggttggaccttcgtctgctcccgtcgaagcaagaagttcatcgatgcacttaataagtgtacccaaggtgaactcaagaccatcaccatcggcggcaaggcctacaagatcccgaaggttcacttctggtcttacgaaagcaaggccaagacttccccgttcgtgaagtacgttagcgggtcggagttgatctctcccactcaacacgggaaggaaggggtttgcggtatctacttcaacccgaaggaacataccctagattcctggtatcccatcatgaagttcctcttcaagctggtatccagtggtctagaccctcaaggtcgagaggagaagattcacatggagcttgctgaaaagtatggcttctggaagtcctacctcgcaatgtctttccacggattggtagccaatggatacaccgggtaccccctcaccaattacatgttcagtaatgattgggaggatatcaagaaaggcgatatccacatccagtccgcagaagagtgcaaccgattcggccgttgggtgcccaaccgtaatgccccaggtggacgtgagtgggtaaggtccaagccctacaagtcagaatacctggggattaagctgaacaaggtggaggtggtaactatttacccccagccaaccatcttcggcaagaaaaccccctacgacatcgtggatacggaactgggaggattcctccggcttactccttctgactgtgaaaaacacggagtggtcatgctggggaccatgggtgaaattcactggggtcgcggctcaagggatatccccctggccctggaaggattcatagagaaaaacttctgacaaccaaggagaaatcaaatgggaatgtatgcagcccataacgtgtactacgatgccgagggtgctgaggttggtcactgctgcgttaaatacgtggctgaatacaccaactgcttcggtgcattctgcgactcaacggggccccacccggatatagtgtgggagaccggggttggacacctcctggtgtctacccacgagaacactgctggtaaactggtagaattcttgaatagtgatctggtcaacaggatcaccgacggtggaatcctctcggcttcccaggactggcccaccgagtggtggacgggatctggccgtaaacaaaacctctccaatcctgaccacttcagcccacctggccgccgacaggctgtgtacgttcgggtggacctcaagaagaacgcatcggcaatcatctgcgcactccgtatgggtgatcgtctctggggtatcggggatcagatgcgtcgtattccgaaggaagctcaggataaaatcctgggattcaacgcagaacttcttaccctcgcggcttgtgcccaggtcggtagcactgcccactgcgacagctatccggcgatgttccctgtgactgctggggagtataaggagcagtgtgaagccaatggggatgatgtagaggatagctacatcagcgaaatcatggaccacttgacgggtgggttgaaggatatcacctacttcgatatcaagagcatccatggacgaactcgcgaagagttcaaggacaagctcaagcaccacaatgacccactctggctgggttataccaaggatgattacctgatcgagtgtgatgggttggatggggtacacgatgatcgaatcctttccatcatggcgcccatcaccatcgacgtaggggaccccggacgggataattcccccacggtacccaccggttattacgaccttcccgaaatcctcgaaaaactggagagcatgcaatgaacaacgcaatccccctgatcggtgcagatcccgaagttttcgtcggctacgaccgtaacccccagagcgtcatcggcttcatcggtggaaccaaggaagcgcccttggctgtagccggtggtgccgtccaagaagataacgttcttctggagtacaacatcgacccggccagcaccaaggaagatttcgtcaagcggatcatttccgtccgactccttggtgcccagatgctccaccccttcggcatgaacatcatcgagaacctgtcgtctcacctgtacgacgaggaactcctccgcagcttcggcccccaggcttatgtcttcggttgcgagccggactacaactgctggacccgtcgccagaacgtgatgccgaacgatgcacctccgaccctgcgcactgctggcggccacgtccatatcggcttcggccacatcgagcgagtcaccaaggctaccacccgcgaggtcatgcagatgtgtgactacctcctgggcctggcctctgtccttctcgacggcgacacccagcgtaagaagctgtacggtaaggccggtgcgatgcgctacaagccctacggcggcgagtaccgtagcctgtccaacttctggatcttctccgtcaacctgaccgagtgggtctatgaaatggcggtacaagcctacacctcgaagcacctgctggaagagtacaagtccatcgtgtctggcgatgaagtccagcggatcatcaacgagaacgacggtgttgcggcggtcgctgctcttcaggccttgggggtgaagtatgaatgacctcaacaacaggcatcgtctggccggcgacttcaacatgtactacagttccaccttcgccttcttccgggtggacggggagcctcgggtagtctacgtggatgacactgaatccatcggggatgaccgccagttcgatggcttccgtctcctgggtaatatcttccgtcccgacggcggacaatactacggcggcgtagtgtacagcgaggtcgaaggtgtgcggcccccgagtgggtactatgacgtcttcggtggcggcgagcgagatacctacgtgtcgttcctcgtgaacaatcgtacccagcgcaagggtgttgacccccggaatgtcctcatcaaccacggccagcaggcagtaaccggtcagatgatgatccgtatcttcctccaagcggaagagatgatctccgacccggcacaccgtgacttcttcatcaaggacggggtagtcaactggaaaggtgtaaaggtagggcagatggtagacaaccggctgtccgtagatgaacaattcaagaaccaggaggacttgctatgtcggttattggcacgcagataggtttccgtaagaaccagatcaagaccccggagcaccacgaggaacttcctgcggttgcatccttcgggttcgaggttgaactggagggtctggaccagtggcccgaggttgatggctgggatatcaagaacgatggatctctccggaatggtatggagtacgtcttctctggtccggcttctggtgaacaggcgatcaatcgtgtggaagccttcgcgaatgccatggaacagaatcccccggcacccaccttccgctgctctacccacctgcacatggatatgcgggatgtgaactggaaggtttacgagcggactgtcctggcctacatggtattcgaggatgtattcttcgatcactgccaaccgtaccgccgggatagcaacttctgtatccccttcttcagcaacgactggttgtcccagaccttcggtcgccgcatcctggcacccgagggtgatcgagagaaggtcttgggccttacctcctggccgaaatactcggccttgaacctccaggtcacccacaacttcggctccatcgagttccgtggtgcccacgcgatgaccactcgctcggaaatggtcgggctgatgcagcggatgatgtgcctcaaggcgttcgcgattgcccacgaggaaacccccttgggtgagttcgttaaggtcctgtcggatgtgaaccttcgtgatatctttttcctcggcgtagcccctgactatgaaatgtctccgggtggccgggaaatgggtatcgcaagcgcatccctggccattgcaactatgggctttgttcgctccggggtagaccccctggaggatgaacagaaccgtcagcgtcgtctccgtgagcaggctcgtgaacaacagcgggcactggatcgtcggttgatggctgcccgaagcgtcctgggtagaatccgagagggtgcccctgagcgttacaacctggcgatcatcgaagggagtaacatgcggatggatcaggtgcttaccactgtccagtccctgaggatgatcgggcaccaagtaagcgtccgagacctcgtagaggataacgagattcttcgtgattccttcgtacttctgctggacaacccggaccatatgcagcgtcaagctggattccgactcgaagaaaacatgtactaaggagataaacaatgtgtggattggtaggcttctgtgccacaactaacgcgagtgataacgaaatcgctcttctcaaatccctcctggccgtggatattatccgtggtgcccacgccactggtctggccaagatcgacccggttaagaacgaggtaggaattcacaagcgggcagtagatgcctacgacttcctggctgatcctgaaaccaaggagttcctggacaagggtcgggctcgcatctacatgggacataaccgttacgccaccatgggtgacaagacggaccatgcgaatgcccaccccttccaggtcgaccacatcaccatggtacataacgggactgtggattcctggggtctccatctgctggacggcaatgacaagtacaacgtggactccaacatgctgtgcgctaccattgccaaccacggagccaagaagaccttcgaagagaagttctccggtgctgctgcggtaatctggtgggactccaaggaacgtaccctgaacttcatccgcaacgatgagcgtccgttgttcatggcggtgaccaccactggtaccatcgtgtgggcatccgagcctggtatgctcaaggttttcctggagcgtcccaacgctaagatccgccttcgttctcccatcgctgaactgaaggctgaagtcctggtaactatcccgttcacggaggccggagtgcgaaagggtgtagaaccccagaccactccggttacatttctcgaccttcccatccccgaaagcgaaaggcaagcagcggcatggtggagtcgctacgtcggtgtctccgactacgaggactatagccgaagccaaggcagccaagcgggaacgaaaggcagcaaagcgggctcgtcgtatggaacgtctggcgatgcgtacgcaaggaacaccctccggatcaacaacaacctcgatgcagcaggcagcaccttcaagcaccgccaactcgtcaccttcgatgttgtcaaagtcgaggcctacgcaaacggcagcgaatacggaactgtcactggaatcgagcgtgaagaaaaccttctcatcgaagctcatggcatcaatgtcgccaaagtccacggctacaccgtcctccgaggaagtatctccaacgcctacttcatcggccaagaccgtgatctcaaggttactgtcgaggatctggcggtaagctgcctggacccaaagcatcggccgactcctggggagactaccccggttttgaggattggaacgatctcatcggagacgaaatcccattctaaacccagggttcaagtcggcggcaccttggggaatacccctccggccaacatcagctaccccttgaaggttcagggacacacgttcaacaacgttcatgtctttcgggacttcgtatcccaggggtgtgcatcctgcggtaagatccctaccgcgtatgaccagcgtaatcgtcatctgacggtgtacgagggtgccaagttcacaggtagcctggatgagtgtgagttcatctgcggcgaatgcgtaatcgaaaataaataggaggtcaaaatgacccaagtaactctcaagcgtcaagtagtgatccagatggaaaccgacgcaactcgtaagtatcctttctcccgcgacaccctggacaagatccagtcgatccgtcgagtcaaggagcaggaactcaatgatgccaacccggacgaggaattcctggtaccggccccggtagtcattgccgaggccatcgatcgactcttcgaagattacttcgagtaaagtagtgcgttagtaatagcccctggccgacccatgccggttcctaagctgcgtacatggggttcaacttaggatcacaggggctattgctggcttcactactaccctcaacagaaacaggagatatgccatgttctacatctacaaaggttcccgagcgtcttccggtgccgtaaatcttcgcaatgccctgggtgcccgaatccttcggtccgaggggtctacctaccgtggccgtgcgggtactgcggtaatcaactggggtaccgtaggtgcagaggcacgacgcctccagggtatcgccccggtattcctaaatgatccggccatggttgctcgctgcaccaacaagctggacttcttccgccacttcgaggccaatgcccctcacttgattccccgttggaccgagcgctgggaagatgccttgggtgtactaaatatctctggtcgcatgtatgcacgtaccgatctgaacggccatagcggtcgtggtatccatctggtgtgtactgtcaatgatgcagaagttgctgcaatcgatgccctccgtagacagggacactacccggtacacatctacggtcacacccacatcccggatgttatcaccagggcacaactgttcacccagggaatcgtcggtaagcgtaccgagtttcgagcccatgtgatccgtggggaggtagccctgctccaggtcaagctccgccgtactgccaacgatacggtgaccaacgaaggccaaagcatcgtccgtaacgtagccggtggctgggtctatggcgtcaacgatgcaatgggacgggatggcgctgagcaggctatgtcggcagcagcagaagctatccaagttgcaggcctggacttcggagctgtggatattatctaccagcacgctactagccgggcgtttgtcctggaaatcaacaccgcgccgggcctggatgcagaaggcagcgccctggaggcctacgtcaagggcttcaacaaaatcttcgaggagactatctaatggctgttcgtgttttcgtttatggtactctcctgtctggtttgtacaaccactaccttctggaaggggccgagtttgtcggcaatgctgtatcctgcgagcggggtctgatgtactccgctggcggattccccatcctctcctttgcctcccgcgctgacctcatcgtaggtgaaatctggcaactccccgagggcgaagcgggggatgaaatgctggagaacctggatgccctggagggttatccgggttggtatgatcgtaccctcaaggatttccgaatcaatggggaacgaatcaaagccctggtgtaccatcaggatagccatatggcgatggatatcgtcaaggatggcgactggaaggcacacctggcaaaacgacaaggagcagtataatgaacgaaatgaccgtagacaaagcagtagaagtctaccgcgataccccgaacaccttcggacaccaagagctacatgcccagaagatgctcctcaaggaaatcctgggacttgtagcttcccagcgacacctccaagactctatcgaggtctccaagattccggaggcctcggatagtcccgagaccagctacggtgggtactgtgacgaatccattggaattcgcttcatgtgggagcgactgaagaaaatcgaggatcgtcttcgggaactggaggaggtctacggtaccttcgtaacaactccctataaaaccctaccgggcaacgtgaatgctgtaccaagcctggttctcaagagtcaactggaggggtaagtgaagaaaatcatcggtgatacggcttgtccgggttgccgagctaaaggtggggataaaacaggaaatcacctcatcttgttcgttgatacagaaaagggtactcggttcggaagttgtaaccgttgtggtcactacgaagtcctcgaagagggtttcaaggttcctgaacgaagggagaaatccgaggaggatatcatccatgaagtcaacgaagtccttgagtatccaattaaagccctcgatactcgaaagatcagcaaatcaatcgctgaacggtacggggtacgtgttggtctatcacaagaaaatggtgaggacgttatcgagcattactatccacgcacccgcgatggggagtaccgagcgtttaacgtccgaatcctagaacctaaggctttctactatcgtggtagccccaagggtggtgttgaccccttcggttataacacccttcggcataaggatatgggccacctgcggttagtcatctgcgaagatgaactgtcggctatgtctgtggcccagatcatggagtcgaaactcccggagaagtggaagcatcttcgtcaggcatccattagttggtcctcgggtgttggttctgctgggcgggatatcgcattccttaaggagtctggtgtccttgagcggttcaacgaggtcatctattgccacgatgctgatgacgaggggcgtaagtcagtagaaaaggtacgtgccctgtaccctgagtgtaagtttgtcgagctcccgctgaaggatgctaacgacatgctcatgcgtaatcggggggatgaggtataccagatgatccgattcggcagcaaggtgaagtctcctgactgctccgtgactgtcgatgaggtatatgctgaggctctggaaccccctaagtggggcaagagttatccgtgggagggcctaaccaaccttacctatggtcagcgtgatggtgaaatcatcggggtaggtggaggtactggtatcggtaagaccctgttggcccacgagattgctgcctggaattgcattgagcacggggagaacgtagggactttcctgttggaagagcaggtagccatgacacttaagaatatcgcggggaaggttgccaacgtgcccttccaccgaccggatatcgagtgggatgagcaagcctttaaagatgctgcgggtaaactccggggcaagctcttcatgtggaagaataagggtcagaacgattgggatcatatcaaggagtgtattcgcttctgggcagtagccatggatgtgaagactatcctactggataacatgaccgccatgaccaaccaccttagtccttccgaaatgaacacggagatcgctcgtatctgtacagagctcgcagggatggccgacgagctaggactgcggatcttcatcttctcccaccttaacccacccaagggtaaccgtacccacgaggagggtgctgaagtaaaggaaagccagttcactggttcccgagctatgcagcggtggtgtcagcttatgatcggattcgagcggaacaagcaggctgacggtgaagagaagcacgagagtcgaatccgtgtaatcaaggacaggaactacggtaacactggcctagtgttcaccaagtataaccctgagacgggtcgcttggttgagcgcgagggcagttacgacgaggtacctgctgacgatgacaccccaatttgattacgtgatctatgaccttgagggggacggactcttcaatgaggtcacaaggctatggtgcgctgttgcagtagacattccgactggggtagtccggggattccggcccgaggaaatggacgtgttctaccgcatcatcgcccatgcaaagttcgtggtcgggcataacatcctagactacgacaaccgggtccttgagaaacttcatgggatcatcatccctccggatcgaagctacgacaccttggttgcatcgaggttgacttggccagaccgaccccagggtcattccctgggtgcctggggtagattcctgaagtgtcacaagggtgatttcaacgacttctccaagttctccgaagaaatgtttgagtattgccttcaggatggagtggtcagtcacgcactgttcaactacctcctccgggtactcggcatgacttggcaagagcttgttgaatggaggactgtagattggctaaaaagcgagtgaggaactacaagcgtgaaagggagctggctattcgacgcggcgaaacgggcgttggctctaagtctggagatgctcagcggcaccgagcccgccgaaaggtggaaaagcgtcttggaaggaaactcggagccgacgaggttgtcgatcatatcaaacgtgttaaagatggtggcggtaacggggattctaatctccgcgtccgtagtcattcttctaacgctgctgatggtggtcgtgtgggcaatcgtaaggccaaaggcattcgtaagaaaaagtaactaaggaggggccttcgggcccccgaggactctctatgttcaatcgaaagcttagcatcagtaacatcctcaattccttcgataaggttctggtgaacctgaagaccttcatccaagagtcttcggaggaatctgagcgcatctacaacgagatcagcctgctcaaagctgagcgtacccaggtcatgcaggacaacctgaaggcccagaaggtactggctaacctggaagaattgctgggaggtaagagtgaagaagtatcgagttaacgttgggttccaggacaccaaggtgttcaacgcagacttctaccgcatcgagttggatatcatccggttcttcgcgggtgattccgatgccaaccccatgaccgtccgagccaatgagatcggtgctgtccgtggatgggtttctgtggaggagattaacgatggcgagtaagaaggaaagcctggaggatcaggcacggaaggagattgccctggagaaggagttctctggtagctggggtggccccgagatcgatgctgatgacttccccttgggtagtgcctgtggcctagatcccgaggtatgcgagtcatgccaatagctctacaagtccttgtcatcttctggagtgcattcttccaggtattcctcctgggattgaactctaagctccttcgggatgacaagatcaaggctgggtttgtagtgtcttggtgtatcacgctggctcagtttgcttacatcaaggccgtggggtcttcccacttggatatcggatggtttatcttcgtatccgggtggggaggtgcccttgggattacctctgcccaatacttctacaagtggtacgacagagtattccacaagaaggcttgacaaatccagaaaagtgtggtataataaccttaaggtgtccggggttgctttacccctataggagatacaaatgagtgaccatgtaagctattccaaacatgtccgtggtaagtacctgtgtaatatggcctctgccctccataagagcatggaggtacaaaggactaacatccgtaagttcctcagcagtccccacattaccctacgggagaagcgtcgggtgttcctgagcctgccagagggattcctgggggtgagctatttcacggggtctcacctgaacctgagttcctactcggatcgtcgaaacacccggattcgtgacaaggatatgagtctctatgatgacttctatgtggacaggggcacccaactagatcctcgggatgctttgtttgccaataaagaggcgaaggagtacgagtttcagtttctgaggaagaagtgggggactgacttcgagttgtctggtgaggatcttgagaacgtcaagggttgccagcgcatgatcgatctgtcctggtatctggtagacctggcctgtgaacgtgggtgttcctacttcgttttcgactggtgattacatgagcaagatcaagagtatcctcatggagcgggtagatgacttcctgctcaagcaagttgctgtggccttcctggagcagcaatggaagctggaccgcagtggtaccgtggactacctctcctacctggggggtgtatctcacgaagctgtggagacagttgtagagaatctagcggagcgtcttaagggggattaagtggattggagaaagtcactgttcgttgagcacaaggtagctgatatcatcagccgccagagtaaacgtggagtctacttccagactcagcgggccaagtggctgatccatgtgcttagcgaacgaatcctcaagattgaccttgaggctgtcccccagatgcccatgatgatcgtaagggctggggccttcagcaagccattcctaaagagtggtaagccgaaccaaaggctccagtccctgtggcaacgtcttgggcatttcgaggtatctggacccttctctgcaatcgagtatgtacccttcgaccttggtaagactgccaagttcaaggactggatgctggatcaggggtggatacctgaccaatggaacatcaaggatattactgtcggcactgatggcaagaagctacgtggatctgaccttaatgaatccttgaataagtacattgaggatctccgacagagcaagtctggacgactccgaatgaagctccaggggatcatccctgggaaaactaccattggggaagtcaagagaaagctcgaaaagcaacgtaaggtcctaacgactccgaagatgactgaagagtcgatggataccgtccagggagacctgggcaagctggtgatgcagcgaatggtttgggcccaccgtcggtccctcttgcaggggctggtagatcaggtgaggcctgatggacgcctagaggggagtgctaacccctgtgcaacacctacgggccgtatgaggcaccgtgtagtagtcaatatccccgctgctcgttctcctttcggacctgaaatccgtgggttgttccaggggacacctgaggctggtgaatggaaatggactgtcctccgccgtgatcttggggagaacgaaagggttaggcccttcactaacatcgtggaggaactcaagaagggtaagtggaagactgtaggaaagtaccgggtatacgtcccagcgaaccaattagtattcgtgggctacgatggtgctggtctagagcttcggatgcttgcatcctacatcaacaacccagagtacaccaaagaggtggtcgagggtgatgtacacacggccaaccagatagccgcagggcttcccacacgggacgatgctaagacgttcatctacgccttcatctacggtgctggggatgccaagattgggactatcattggtggtacaagggcggacggggctaagctccgggcccaattccttgaagctaacccagaccttgctgcactgattgagagggttaagcaggaagccgagaggggttatctcgaagggctagacggacggaagctaaccatgcgacgttctgagtctggcgacgtgatgatccacaaggcattgaacaccctcctacaagcagcaggtgcaattgtcatgaagtgggccatggtgctcctagacgagcgagtccgtaggttaaacctgagggcttggaaagtcttggatatccacgacgaaggtcagtgggaatgccacccagaggatctcaaggcgctacgtgagcagatggaagtctgtgtccgggatgctggggagatcctaggtgttaactgtcctttggctagcgattctatcgctggtcgctcatggaaagacacacattgatacatctgggggttgactttcagcccccttttgtggtataataccttcttccctacgagaggtttaagatatgtctaagaaagtttcccaacgattcaccttcccggtagcgaagctgatcttcccctacatcgtaactccggataccgagtacggtgaggtctaccaagtaaccatctgcattccgaccaaggaagaggccgacaagctggtacagcagatggaatctaaggatgttcgtctgaaggacaccatcaaataccaagagcgagacggcgagtacctgttcaaggttaagcagaagaagcacgtggactggatgcaggatggcgaacgtaagtctgccgtgatgaagcctgtagtcctgacctcggataacaagccgtatgacggccccaacccgtggggcggttcgactggcgaggtaggtatcctgatcgaaacccagaagggtccgcgaggcaagggtactatgacggccttgcgactgcgcggtgtacgtctccacgagattgtatccggtggtgatggcgaggatgatcctctgttcggtggtggttttgctgaagaagaggacaagtccgaggacgtattcgacgaggtattcgatgacgaagacgctcctatctaagggtctagcggatcatgagtcgggggtatgccggtcaggctgcccctactgcttaattgaattcgagaaagtgtggggtgtacgggtggtgagttctacagctgcatctaataataaagtagaggtcgatcctaatggaatcaaacctggtgagccgggcgctaagctcgatagcggcaaggtggatgttggaatcatcttcgaagcgttcccgagggctctatatgcagtggcacaagttgctaacttcggagccagcaaatatagtcgcgggggttggaggcatgtcgagaacggtatccagcgatatgacgctgccttcggaagacacctccttgagcgtcacaagggaaaaactttggacccccaaagtaaactaccccaccggtatcacgaagtgtggaacgccctagcgtccctggaactcgtcattcagcaagaggaggaatccaatggaacttctgttggacccaagggctaagactgttcctagcaactactctgtgatgggaatcgatgtagacctggggcttcccccaggctacagcctaacggaggaagctatggacaaagccaagcgtcaagagagcgagtattacgactggaaggggtatgaagcactggccaatccagtgatagagcacccagagtaccgagccaagggtgaagcctttgccctccgtgtcttctgggaagagaagctcaaagaatcccaggtcgtagaagaggtatcgtgatgattgaggagcggttctggtccaaggttgataaaaccgagggttgctggaactggacactaggtttcccatacaatgctgttcagaacatcagatatggcagggcgtgggctcaatgctgggagtagtccagcgtaaggagggtaagtagtatgatcgcaggaattgatggcgacgtactttagcttcgctacgaattgggacatgtggctatgtcgaaggaacacatcttcgatatccaggtggagaagccatggcctgaggaagaggtccataagctcgtcgatgataaagtcgaacaaattatcaaaagggtaaatgcagatgagtgtgaaatctaccttactggccaaggaaattttaggctggagcttgcgaaaatcaagcaatataagggtactcgaatcggtcttgaaaagcctcatcactgggaaaccgtgtcggcccgacttaaggacaagtggggagcaatcactttccacggtatcgaggctgatgactggctcggaattcgagggactgaagagggagataactttacagcgtgttctagagacaaggatatccgccaagtcccaggatgctaccattacagttggccctgtggagattcccagccggagttgggaccatttcaagttgatggtcttggaacagtctccgcttcttggcgaatgtatggtgttaagaaaccgcagaagtcatggaagcttgagggcaacggtacggcattcctctacgggcaactccttgttggtgactccgtggataacataccaggcctcccagggacgggaccaaagacagcggcagatttgcttggggagctttctaatgagagggatctcttcgcagcttgcgcttacgcctaccaacagaagtacggagataattggaaggagtaccttgtggaaaactttcgtctcctctacctcattcgcgaccgctcttggcttgatattcagcagtccggtaacgagtatcactgctcactgaagaaacattgggagatcccctatgacgacgaagatttattctattgatgaggccctatctatctgtgagggtctcttcaaaatcctggagactactggcttcactgactacaaggtggctggtggtttcctccgggatgcagacaacggggtagcacccaaggatattgacctatatgtacgcaggcctcgtgtagaagccattggtagacgagtctcacgtgtctttgggccccagatggttccttgcagtgatgatgagcttgaggtagaagtcatccggttctacaacaaacttggtcacaagaaggttcgtacggggtccggggaattacgcaatgggtatcccgaggggttttctgtgtgggagtccattggtgttgatctcccggttaacctggtcgtatccactgacagtcacccagcagagttcgacatggggatctgtgaaatctcctgttggcctattggcacccttcgtcgtaaccgtagtggagaaatctaccggtccagggcatacgagtgggacaaggagaataagtgcatcacaatcaatcgtatggttgatccgttgctggagagtggcaatgagataaccgttggccagatcgagagactcgttaatcacgtatcgagggtaaaggctaagtacccagaccaccgagtgtgcattggggattggatttggatgcttcttcgttcacgttcagtctacgcagggagcgcaatggattttatagtaaggcttcaagaggagggtctaattggcaaagcaggggagattcttcagaaccaaactgaagtcattgattgggacgaagtacgacagcgaaaccgagaagatcgtccacgagacgatgccttggatgcagttcaagccgtccccggtaccatacgtcatcgagcacaagtacaagccggacttcaaggtatcgacattacaaccttgtggatcgacgaagaatctgttggtcgaggtcaaggggtacttccaagaggcgtctgaggcatccaagtatatctgggtgagggaggcccttcccccggatactgaacttgtgttcatctttgagcggcctaatacggcctgccattggcttagtaagcgtaaggatggcacaaagcaatccatggcggaatgggccgaacgtaacggcttccgctggtttactctagagactttcaaggagtccttccctaatgagtaagaagtacaatgaagacactctcgttatcgcggacactcaagttcgatccgaggttaacatcgaccacattggtaacctcggggagtggatcgcacgtaaccgccccaagcgaattgttcatattggggaccattgggacatgcccagcctgtctagctacgaccgtggtaccgctaagatcgaaggccgacgagtcctcgctgatatccaagctggtaatgatgcgatgcgagtcctgctcgatcctcttcgtcgcctacagcagcatcaggcgagttgtaagaaaagggtctaccgaccagaaatgcacttcttcatcggtaaccacgaggagcgtatcaagcggtatgaaaactctaaccctgctctccaaggttttattgggtacgatcattttgatctgtccgattggattgtccatgatttcctcgacgtgggtgttatcgaaggtgtcgccttcgcccactacttctacaatcccaacagtggtcggccatacggcgggagtgccgagcatcgcctcaataagatcaagcgcagcttcgtccaaggccatgagcagggattcaagtaccacatcgaggcagtaggaaagaagcgaatccacggattggtagtcggtagcttctatacccacgatgaatcctacaagggtcctcagggtaacgaccattggcgaggtgtagcccttctccggaaccacaaggacggggaatatgacctcaagctgatgagcgtggaggagttcctgtgagtaagttcttgccagacctgtactacattaagtctgagcatgacttcggtcaacgggggttggcgtttaagacgccgatctccgcagaactctggctggacatgaagtttgggaaagggggtgcagaggaggggcttaagcgagggatgtattccatcgaagtcctggagatcctctacatcccaagcgttcaccttccagatatcttggggtaatctatgaaagaccgagtgggacgtaagctagaggtaggggacagtgtagtcttcctggtccacaggaacacctcctcccatctagctattggtacagttgatgggtttactccgaagatgattcggatcaaatgtcctaccatgagttggactattgattctgaatatgtcctcaggagcagtgacaaggtggtgtactatgacaaaggctgaactggagaaagcacttgaagagacgcaaagcgctcttgcgaaggctgaggcgaaggccttttcctttgaagaactggctgaagaagctaaaagacagattgaattcctcgaagggatgctagacctagtagacctcagggcttctgtattctacggagattggaggggttatgcagaaagatcaaaagggtaagggtggattcccttggacctacattgcggtagcagccttgtttgccctgctggtttatgtagggtatagctgactgatgttactcctgaccctgggagaaatatctaggttactaatcgaagtgttatcttgggcaggttccttatgaagtatcgagtgcagcagctagggaagcgtctcttctacatacaaaagaggtttctctttatgtggaggactgttacggactcgggaggttgttttatggccttctactccttggaagatgctgaggagttcatccgggataacctaaagtatagggattctccagtctaccaccccgtcgagtaaccaaaaaaaaggccccaagggtatcatcccaaggggccttatctttagctccggagagcgttcagcagagtgttgaacttatccacgagggcctcgtgagtgtccgtataggaagccacggggatctcagatatcttatcctggatggaagccgcaatggcttcatataggccactcacttcgctagccttaggcttccagttacctggtttagcctcactagccttagcacccacctccagaagcttaggcttcccctcaatatcctcccacttcactggctcaaagtctttcgggccaatgacttgtcggagggtcccatcctcattacgaacagcaatagccttcgattgaataacgaatacactgttgccgtcgttgtcagcgatataacctgccataattaactcctaattaagctgctgatttgaaggtacccacggtaccaccgaagggatatacacggatagtgcattccccgaattgaccatcagtctccgtctggttacccttagcataccaagccttgtccggagatacagcaaacttgatcttagctgccgatccctggataaagtggaagtgacaacctggggttacatcggggcccagggtgacggtaatctccgtagtcccctgagacatgaagaaccatccagactgttgcttagtcagggtaatattctgagtaagctgctgggtattgacgacgttaccacccaggtgagtagtcacaaggcggggatcaaggtagttctgttggagagaaccaatgttctgcacaggaccacgcatgtcgtcaaactgctcgataatgtagtcaccaatggtaccaccattttggtcatctggaccaatcacgtgcttgatagccacataaacatccaggtgttcccgacgggggtctactcggaattcactaccgaaagcagtaccacaaggggcctcaatcatagtctcagagaacaggccaatcacgtggccagggtcacggttaccacccgaggtttcaccaggagcacccacaagggtgttgaccaggacagaggggataacggcctctgaggggttctccgggaaggaggctgtaacgttctctactaccagggctgcgttctccttaactgcataatagtcagggaggaactctgtagcggtaacgatgttagtatttacccgaccggcatccgaggtaatctcaatgagatcaccatcggcattacgtcggaagacttttggcacatcaaccacgtaggcacggccaccaggaccagcggcatcagtttctacataagttgccatattacttctccttaaagatccagagcatcttccatcgcttccataccggcaacgaaaggacgtgctggagtttgcttatacaagaacttccagatttcacctgcggaagggtcatccccgaacgaggcaatagttttaccaacagccatagcaccctcagttgcagcaccagctactggacccaatagtacctctgcgggggtagtccctcggcggtaacccgtaagcatgtcgtagatcatagaggcctggagtggcatctgttgcatcactacgtccatcatccgttgttctggactacgggtatcctctcggctagacccaccgaacttagccagttgacgaagctcatcctggagatacccaagactcatcatcagaccaagagtgaaggctacacctgcggcacccataccagcgttggtccaagaaccagcgaagtgtgggctcattcgtctacggaacatcggtaggatgatgttaccataggctgctggataacccttcaagagggagaacatctgaacgtttccattgctcatccacataggcttatcagcgaaggttgggtcgaggactacctgatccacaaatcgacgcatagccagagtcttgacgttgttagccatcaagacttcagatggtgtagctggggagaccaacttgagggcatcctgctggataccgatgttaacccccatttcccgaagctgagcaaccttcagagcaccattagcagaactgaaggggaggcctgcggctagatccatcaggttattctgatagacccgcttggcagtctctgttgcaaacacccggttaacatgggttagaatggacaagccgttgatgaggaactgaccacggattgccttttggacagtcgtgttaaatacctcagcaccaacccgatcggccatcaaagaggtagcagaggacagggtgtggttcatatcactcataaacctaccggtctcagattttggaaccccactgtagatcctacgggctgcctgtcttactacctcccccatagttggcaatacagccccaagggtaggcatcacccctgccttagcgaatggtaggctgaactcagttagggtagagaaccctgcgaggggtagtcgggagagcacgagggcacctgacgtaacagccgccagcttcttaaggttggggtctttgatacgaccgtgcataccattgtaggcatccactaggtcatacatccgatccacttcttccttagtgactctcttaccagcccgttgagcctcagctacagcagaagcaatcttagcgttagccttctccccattgataccaaacctctcggtaaaggcaatccggtgggaagccccctcgaagtaatctcgaatttcctggagacgcttcttaggagtatcgttgagagaatacttgttgaggatctcttgaggcacggagccaaaggcccgactctcttccagctgaccatacttaggtactgcatcactctgggcaaaccgtccacgtagagtatctggatcaccttggatacgatatcgagggtctacttcccaagccccggtctgctggttctgagtaaccagtcggttaacctcaggggcagtgttaccacgagtatcatccgagacttccgccagccagttggctacagcatcctcagcagcttgacggttctggaagtacggagtgatgtcgttcaggaactcgggggtctgaaccttctctggggatagaccgaatggcatatagttggggatagtaccaacggacattccaccacggttaacagcctcattccgtacgtcatccatcaaagcacggagacgggtagcttctggggtattgacacctgcggatgtatctgagataatcctgtcgatctctttcgaagacttaccctcgaagatgttatcgagttcagagttccacttacctgcctggagttcctgatcctcaaagatagtcttaccagaggctcgcttaccactcatgtctgccctgaaagtctcagagaactcgcgggcgataggggaggccttagcaagtggctctagaagggacgtagcttcgtttcctagggcatcccaggctttcttgaccgtacccctaggctcaaactcagaagccttaggaggggcctcaggggcgttaggatcaaccacagcagatccagcggagtcctgatgacgacccagggtgtccaaaccggaggatacagcaccaccagcagtaccaatagcggtaccagtgaaggcagccgtcaggaggttatccatgaactgctctggggtttgtacctgccctactgcatcataagcaatagtatcctggagagcctgttgagcaccagaggttacaccttcagccacaccagagactgctgcatgcttaccagcctgggtaacagcctcgatagcggtttgcttagggagtccagactgaaccagcatctggtatgccccgtccttaccgatgtgcttcaagagagggccagcgatgaccccagcaccagcggtatccagggcagacagtccagcacccccgataactgcggtccagggattgctttggtctgggtctagctccttcatctggttgctcagggcacccacgttgatacccatggagcttaggaaggaaccaatgagcgctccacccatacgacctggggccccaaatacagagccagccttagcccctgctgcaccaccagcaagtacaggggccatcgaagggagagcctctacaatgttattcttgaggaacgaaccgatggatgggatatcttggatatcagcgaaagaccgaacatcaggggttccgtactgtgacgcttcctgagcattctcctcggccatctgtgtgccgtagtctttcaggtagtcactgccagtcagttcaccaagggtagcaatggtaccaccgatgttagactgcatggtatcaaccccgcgaccaatcgcagagctaatagaattagggtcagccggagttactagggcactcaggtctggggcaggctcaggggtagcaggggctacttcctggggtgcctcttcgataacctctggctcattcaaggaagccaattcagcggctacgtcgaggcccttgacctcagccagttccgcatcaatagcggccttcagttctggagaaagagccataagtcaccttctagttgctggaaagagaataggctcttaagatgtatcttaggatactaaccttcttagtaagtaagtcaaaaggaagaaggaatcttaagagcctataggtctattatactacattttggatactttgtcaagtaccttttatcgggttggagcaggatagtccagatcaccaccaaagaaccagttacccgtaggttgaagcttagcagcctcccgctggataataccaatagggttagccccagggttagccctcatttcgttacgaagggtctgagctatagcctgttgggcagtcttaccaagcttcttaccacccagggcctgagatccactgacttcactgaggatgcccaaggcatctttggtagtaaccggctcacctcgggctgccttagctgctgcctgacgtgcctgagcgctaatcttagcagtcttcagacgtacagcagaactaagctgggcattctcttgagacatatcctggccacgacgggttgtttcagcctgtagctgagcccgttggttagccatatcctgtccacgctgggttagggcaaggttggctcgcccccgagcagcctcctcagcccaccgatccagaagaccagtgttcttacgagaggtttcctcaagggtgcccttcttgacctccaggttcccttccccaagacgtacatcagcagcatccttagctaccttacgttccagatccttttccttgatctgacgatcagcagctgcggcagccatcttctgctggttgatcccagcctgtaggttacgatccagttgacgctcataggaagcagcgaacatatccccggctttaccagtcttgtctatggccgaagccagaagaccagtaccaatgagagcataagatacataacgagacaggtcatcattatccatagtcctcatctgggtcaactcttcgttcacccgattcttaagctcttggggtttaagctctacaccctctctctgggcatcagcctcaactacagcctgggccatttcaggacgacttacagcaccagtacgaagaccctcagctgcaccctgttggataacctgacgattagcctcctcctcatctgctacagcagcaccagcctcggaagccacctctggggtgatctcaggctcgatagagggttggttaggggttaccccataggacaggagttcagccccagtagggcctcctgtggcgttctgggctgcacgttggcctacaccctgggcccattggtttgcctcttgagcaacctcaggccccatattctccacagcctgactagcctgagccatttcttcagcacgagtccgttctgcatccccgagttctcctggggttacagcagcttgtatacctacagatacaggaccaccgaggatacctgcgatacgacccagggcaccacgacccgttgcttcagccgcaggggctacctcttgagcagcccgagaccaacggtcagggttctcaagggcagcctgagcagcacgacggacacgatcagggagtccagagccttctacagccagcggcagtttgttccttgcgattcgcgccatatccagttcattctgagcagcccgaaggatgctagggcgaattggggacccttcataagccatgctggccataggattaacctccaaatagtttacttaggattccagacttgggttgctgtccgaaaccgagttcttctgcgctaggaagaatgcccattcccgctcccatacctgctgcaacttctgctgcgcctcgttcgcttgctcccctagccccttcgacagaaaagcttggtactgcttctgaagaaggctcacttccttgcccgaggagagccgcgagtgctgctccgcccattgcgccaaaagggtttgattgtccactagactctcccgattgcattgtcccaaggtgggtggggcggtaggaaccttgacggctcaactgtacccgctcctgcccaccacctatattctgtcctatagcgaacagcttctgaggaagggaggccattagaacagaaggcccccgaccctaccaccagtattcataccaacagaagcacccgctgggccaccgaagagagcgcccaaggaagcaccaccgagagcacccagggcagacccgaggccaccaccaccgccaccacccgaggaggtagtaacgttggttcctcccatgtcaccggagataagctccttgtaggcgagtaggtcgttaaggctgacgttattctcataggcccacttctgtagtgccccattgatctcctgctgctcctgattctgaagcatactaccagcatctacctgcatggcattaccagagccgaggcccttagcaatagccgacaggttacccagggtattcaacctattctggttgtaagcctgctggtcttggaaagccaactgggaggcgttattctgttgattctggagcaacctagcggtagcaataccttctgctacacccgctcgggaactcccatactgaccagcattagtggcccctgctcgcaggtctgggcgtaccgtagtgtcgaagtcccattgcatctgctcgttggctgcaccaatggcattcgccaagccagttttgttgggatcgtaaggaccaaggtaatcagccaaagagctaacacctgagctacccaggagagactgaagggcacccccgagaccacccaacccttcgatgccgccaagctggagagcattttggtcagccaccgggtcgaagttcggatcacccccatagttagggtcaaagcccccgttatgtagccaatcactggcacccgagagtagttcattatagttaccttgctgatagggtgtagagacagaggtggtcttttgcttcttactaccacccttgtaagcccgagaatctagggcatcctctacatcgaaccccatcagacgctttacgttaaattggaggaagttcatctggagttacctcacgatagaaggatacggagtcttcggtgtacccgagtttctctagggtaggcttccagccccgacgaccttcgcattggataaaccgacagttaactcgttgggcgaactgtccgaggaagtcgtctacctccgagtaatctaccggggtttcattcccaggcatcttaccactccagaagaagtgaaggatgttacccaggggtgcttgggacacttgaattacaccagcgtagccactctcttcctgatagaagacataggcttcgtagttaaccaaggagtggaccaagtgttcgaagtcccaaaacttaccgaggtccgtcctattgaaggctcgggccagagcagggactacggtaggaagcagatcgatattctcacgagtaatcaaatgaatcatggagtcaccaccagggggaatgtgaatgtacccccgaagactgctccttggggaattccttggattagaacacggccattagctgtgatcttaaacattgcttggttaaccaccccagtctgaatagtagccctgttgagaacatcaaagacttgatccaacggaggtgcgttagggtcagacggaggtggataagtaatagtgctctgcgctgggatgatgctggaataggccgggataaacaactcagcagggggccaatacgcctggggaagatccaggacagtagctccattagtgtagttaccaccagacatgagcatggttatccatacttcatccttagcagtgttcatcctataggcacaggtacccatcggttgatggttgttctgtggggtaaataggataaagtcccccggcaggtccttgggtttagtacctgcgagtctccattggttatccaagtcgtaatgatagatgccggatactggacctaccactccgggggcaaaatactttacagtccctggcttgagcttcttagggggctccatagagaccccccagtagccgtcagctaggtcattaagagtctgtccaaccctaacgaattcttcattaaggaagggcagcagttcctcctcttcctgtggtggaatcgaagggctgtacttttgactcatcgcatacctgccttcggggccatttcaatagtgtacccattgaagtaccaatccccctccgaagagaagtcgaacttcaaggctatataccggcccacatgtttagtgtcaatcttatagtcctgaccaatccggtatgggtaagggcctttccatcgaataccagaaccttgtacctgagcgttacccacccagatgttacaagtaccgttaccagtaatgtgtggaatgatggcactcactgtcttcatcattcgatcatccccgagatagatatcggatctctcaagggtactgacgaagttctgtccagagaatgtagagttattaccgaagaggaacaatttcttatcctggaaagatgagaagatcatactggactttgctgggttataagagccttcaccccagaccgaagtataggtatcccaggggttggggtcgtcatcccagaggttagacaccttaggatcgatgatcccgtaggctccactgagaacgttgggaaggtctcggatactccaagtgttttccttccagttccagatgatagccctatcgcagtgcttacctggctcagacctagtagaagagtagcatacccacatttcagtattcacgtggtctgcaattacgaaggtccgttgatagttgtcagggttaatatccgagaagaagaacttacggacctgagcatcaataacagactgcttctgcacaccgttgtggacatatacgtcaccgtggcctactacaaagtggttaccatcgaactctattgcacagttgggtccgaggatacctacgtcgttaaacagctgctggaattggaagatgaacaatccaccgatataccgcatggagtatacagagtcttccttgtagataatgaaggagtcacgaagcttaacaccatctacgatggcaccattggtatcagccaaggtgttctgaccagcatccttagtagggtccgttgggtcccaagatacaggaatacccccagcatcagccgaggtactccaccagaccatctgtggcatttctacagagttctgggttacgttcaaggcaatcataaagttcttgaacgacttcattcgtttagcgaacgtgttagccggccagttaggcatgggaatgaacccactattctgtggcatcaacacgtaaggatagttgcttgggttgttagcaaagatgacaccattgaatgaaccagaggaccatctactggttacacttgcagagtgtccacctggggatacatccacaacggtagtaccatccgccaagtacatacgctgttcgccacacaggagccaataggggatgttattccggatgaaagggaacatatccaagattggggcctgggctgtatcaaagataggcgtatggcccagagccttctgagccttgccgttcttaaaccggacgttgttcccgaaggaccatttctccagtggcaggtcagcgggggcgatatcggtcacaatccccgtagggttcttgacctcttgtctctctagggccattgtatacctcagttcttaatgatgaagaacacagaacagaacggtgggatattacccaacggcatgttgatctttactgcatggttgtgagtctgaccttgaccagcagggccagtctcaaggttggtattggctgcgttaccagagccacccgtcagagcacccgagtcacccgcagaaccggtgagggtagtagcccctcgggatctccaagtgtgggtatgtgctgggatttgggctagggtaagggcagtcccttcagtgaacccatcccatacaatgttagcgctaccgcctctagtacctacagcctgggaagatccgtcgataccccaggggaatgcaccaatgaggttggggacggggataccattagaggtagtccctacaccattacaaagcttccaacctgctgggatctgagccagtgacccagcccacatgataaccatcccaggtttaacatactgggttgtatcagcgactgcgtttagctgggctgccgttacagtgacagcctgagaaatattggggaaggtattcttaatagcactcttaatgagtcgcaggtggtcatccccaaaggacttcagatcagagccggtagggttcgtaggcaccaactggttaatataagttgcgacctcaagacccattcttggcctcctttatctcttctttcatttcttttcgggtgacataccgctccccaaagattgccatagaaatctggagatcgctcaccgctttggtgagcttctccgtggcctggatgtttctttcaagcagagcctgatgaacattctgaccgacaaccgaggaacctaccgtcactaccgaggatacgaccagggcactgacgatgctgcccaggttatcagttagaagttgcatcctccgtcttctccttaaggttgtcttccaggacttttacgaactcgtcgtcaaccttagagttagtcttctccgccagggccttagcaccagtcacgattgacttagcgattaccttggttgggaagagggtagccagaaggttgattgcgagggtttttagaaagataggcatctgaagctccttaacgttcaatgtctttgatcgccagtcgagtgctagcgaagtcagcggcattctcctcgttctggagttccataacagcccgttcgagtttctgaccccagaactgggaccgagcttcatccatggtgtacagataaatctgctcaaggacaccatagagataaatctgcggatacttcgtcagagcccaagtcgttgggttagcgaggcttagctctgggagtacagtccagtagttcacaatgaacggggcaccgtcaggaacaacggggaatactcgccagaagttacccaaccgagtgtagtaggttacaccctgaggttggtagttatagttaacatagtgggtgaagatatcttgggtgatgtactgaagagtacgcccaccgataagagagtcacccgtgatagaccttagagcaacaaagtgctcagggatctcaatgccaccaccgaaggccatgagagtttcgaagtgttcgttctccctcactcgtagcaatcggttaagacggtcagtagtgttcccaatgaacaacatcagaagttcttgggtaagatcctgacggtcagaccactggatagcagcaatagcgagatcagttacgttattgatcgtagccattcattacacccgtgcctcagaggtccgcatccgatagttatctcggtcattaagccaacgggtaaatcttgcggcatggtctgggtcacaaccaatcaggtttagatcgataggaccaccttcagccatgggacgattccgtagtgcctctacgacaaccagggggatacttgctaccttgcgcatattatccttgcggttgctattgacacccgagtggcgctcttcggcgttagcggacaggattgactcaacatcttgagtatcctttcggataaagagcccaaggtcttcgtcaattgcataagtcgattggatactcatgatgtacctcctaaggggaaacaaagggccccgaagggccccgttgggttagacctgggctacaacgtcgcggatcagagcaccggacttctcgttgtttacacgcagggtgtactcaaccagcagctggcgcttctcgctgtcaccggtcttagccagttcgtgctggaagaacggacgcaggtagcagagggcgtgcatcttcggatcaaagatgaacatggtgttttcgtggaaccagcggttggcacgaatggtgtacttaccgaagtcactctcgtagacatccacggtctgcgcaatgcggttgtccgaggcatccagggtgatctcagttgcacgacccttcatgttcttgctgatggccttcttgatcgagctcgaagtctggatcgagttagcctgaccaccgttgcgccagatagcctcagaggcattcaggagcatgtcttcggtcagaagacggaggtcaccagcggtaccagtgtcggaaccatcaccagttggcagggtaccgttagcacctaccgaaccgttggtcttgtagtaggcaaagatgtttgccatctgacccggagtagtggtgttacgctggatcttagcctgaggggcaccgaccatggcgtattccatgtccagcttcagttccttcgacttcttagccagctgatacgccagttcgttcttacgaccagccttcttgaccttatctgcggtaccggtgacttgcagggtctcgtccgagatttggcagaagttgttcagcatggtggtgaagctaccagccttgatggttgcatcctcaccttccactcgggtgttcttacccggctggcggagttcatcagtctgccactcgtgggtgatagcggtagctacgcccttgccgatagcagtcatgaacggggtgtcatagggtgcgatgttgtagatgatatcgataaggtcttcgcgcttaccgttgatctctacagtcgagacggcattagttggagttgccataagttacgtttccttctattagaaaatatcgagagaggagaagagagcagcagcggcttcaaccgactgatctttcctcagattagcgcgggcagctttaacccgcttagaaccctctgaggcttccgccctacgagcagcaggtttaactgcggcaggtagttcagtctcctccttcttctctagggcagccttgcgacggacctgagattcagcccacttacgtgctgcatcaagtacagccagttggcgggcatcagatatccctcggatctcatcctcggagtatccaatcgatttgccgtaggacacaatcttgtcaccccaagactcatccgtggtcatttccgggataagtttcttggctagctctgtctgacgcttaacgtaggcagagtggacaatctcggctcgcttatcctgcatagccttaatgtcattgcggcgtttaattaaggcctgggctcgatctcgggcttccagggcttccagtcgaagattttgatacttctctgggtcctgggccttaagctgctcccagtttacattgtcatactgattagcaccagcaatagcggtaacagcatactgctcaagctcggccagtagattagagcgttcagcatcaagctcttcgaatttagctgcatactgatcctctagttcagcttgtcgagttacgaactcttcattgcgaaggtagccactcttaagctcttcgaagttaacctcgtagacttcatccccaatcgggatctcgaagagtttatcctcaggatcttcctcggactcaacctcgggatcttcctcagaaccctcttcttcctcctcggactcaacctcttcggtgtcctctggagtaccttcgtctactacctcttcctcctcttcttcccctacgactttaccatccacggtttcatcaccgggggccaggaggtcatcacctagcaaatctccgaaggcttccgctgcctcgaattcatccatgccttgattctcaaggtccattacttatactcctttagagtgatcgaatccaagattgcctggatacgaagttgtacgcggttaagggcgtggagctcgtggtatatcgcctcccgagtctcactatctttgggggccgtagccttccattcgccctcgatctcttcttggacaatacggaaaagctcaggaagaacgttctcacgtaccatctgttgtgccgcatcagtcagcactagactatagccaaaacgttctcccaagattatttcctcactgccttagatggcttcttagtctcaggtactttaccgtctccgatataagcagcccgagcctgagtagcctcaagatgatactccgcttcgttacgagcccgttcccaagtgaaacgatcacgctcaagttgtagttccgcttccttaagggccatttctctctgctgaaggacagcctcttgcttcttcagttcgatctcagccagtcggatctgagcctctacctgcttcatctgggcctccgcttgcttagccaaggcgtccgattgggcacgttgggcatcagcttgggctttgatatcttcaggcttaggttgtgcttccttctgctccctgatggccttagcctgttgagcttcaggagaatccgggttagtccagaagcgatccgggtctttatacccagcgttctctgtgacttccttaaggatattgtaaaggttctgctcagagactaggaccccaagaccaccaccccctactacagcctgggccatttcccagatacgcataaggtggagcatctgctggtctttgttcatgttgccaataccaacggtaaccgtcaggtcggatctctctctccagttggcagggttaatagcaacccacttgcctcgtagctggaagacctcttcctgattctggtacttgatggcatggtcatgcagaagttggaacaaacgcttaacaccagtctctgcaaacatccgggcaatcaggtcaatctgttgctcagcagcagtcatcaactggttaacactcatagccgcttggttagagtgcagggtgttttggtctagtcctcgggtacggtcagtgatacctgtccgcttacccctgtctgcctctagacggtctagcataccgtagacttccccagacagctgaggggtctccagaggcatgatagagttcatggccttaacccgaacgatacccgctgcctcgttggtcagcaagtcttcgaggttaacctgtccatccaggactacagatcgcccttggttggtccggtagatgttatccatgatgttgcgcatgagcaccgaacggatctcttgaatgtctcggatcttatcgtagacactcatcccgtggaacttatgggcaattcgataggcattcaggtcagcgaagggacggcaatcccaaggctcgttgctgatgatgtagtcgcccacgtacaggatacggcgcaactcagagataccatccccatctacgtccagaagggtgtagcactcagaggcccatacctcacggttggcttcagcatcatccccagagttgtactggagttggccagtcatatcgaagttatcacgtaccaacctttctggctgactatcagagaattcatactcatcgtatggaagctcatctagtacatcctcgggaacacccaagagcctcaggtcacttacggtatacttctcacggtgacagaggaagcgtgcatcatcaatgcaggtagccaatcgatcaaccaggaagttctcaggcttgatacaggtgactttaatctctcgcttcttcttgtccttgcgaattttaatactgtaggttccatcctcatccacactctgtgctagaatctcagtgtctggatcagccaggatatccgctaccatttcctcagagagaccagagaatcgttcgaaggtaggattcaggacctcttctacatagacctttacaacaccggtcttcatcatcagagtgtcttggaaccagtcgaacattaccttgaacccctcgttcttacgcatgaagaggtagttcacatactcagtctcttgctctgcctgttcaacatcttcggcagtctgaggttcatacttaactacttgaccgcctgacgtgaataccttcataagagaaggcataatccagtctacagtctcttgaacatccctagatacaatcgcggacttacccggacgctcattaccgaagggctcaccgaagtaatacttcagggcttcagagcgttgtttagatagttccgacgagttgaaatcaagggcgtcgttaacaagttggtctagatgacgaagtacctgttcatcatccataggcttaatcttgcgacgacgcttagccattagacaatactcccaaaccaatcaggggtcaactttgcagtatcactcctgtagtatccactgtttcgtacagcaccaggacgtgcatgccgggaagccatcaacagggcataccgggtagcggatatcatatcgtcgtttctgtcgataatctttccgtcctttcggtggtacattttcatttcttttaggaagttcgtacacgtattaaacaccttcagatcaccattctccatacgggtcaacatccagttaacgccgaactctacagagttacctccgtgtttaccatcaggacccggtgggttactgaagggctcatacactacattgaggttgtggtcatctttaagaaggtctacgaatctacgaccagaggttgctccatcgtgcttaaaggcatcgtgggggacaactaccgggatctggtgaccacccttcaggtagatagcatcagcgtgcatccccaaggtctcaccactctcacttctctcatcatagaggtagtatttgtctttctcagggtcccaggcaacacaggcgatagcgttagggtggtcaaacccaaggtcgataccgatgatcctatggaagtgatcggggatctggaaaggctcacatacaaacttctcttccagaatggggaagactacaccagatccgagcataggaacaccctcggccctcatcctgcgttctgctggagagtatacagagagtagctgctctttaacttctggactgaggtgtggggcgtcttcccagcttgcatggacaaggaactgaccaggtttaagatcctggaggaagtccttgacgatctccgtcagaccatgctctggggtaaacgtcagatatacaatacccccagtagtagccgttcgggttacacactgggtataaatatccttggggcattcctcatcgagccagataacgtcgatggcagtacccatgaatttgtcctgggacatttcgtaggacttgaagataagggacgagaggcccccggaggcatgcttaacaactactgcttgcacacatccgggtttaccttccctacgaatcgtctctacgatatcttccttggggatcatccccgttccaaaagcctcagggttcttccagtcacctagtagttcggactgaagaatatcccgagtggtatccgtggagatccccgccgcccagcagttcactggacgatcatactttctaccagtccaccactcagggtagcgaccggtgaggtggcaggccatgataaaggccccggtgtaggttttaccacagcggttaccagtcatagccagcaactgggcgcagttcgaggaagctgcgataaacttctcttgccacccataaggagtgtactggttcatgcggaaatacttctgccgctccgccaactccttgactagattccgtagccgctcttgggtatccattagaccaccttgtcacctactgttgatgcacgccacagggcccgttggaggtcccttacgcgcactggagtttgtttagcccagaggctatcttctgcctcccatgcagcttcatcaaaccttccggacttcaggagattccacgtcttggggaacttcttcgtccacgctgtacccagctggaagttgacgctaacgagggcatcgaatagctctggagtgcaaaaaggcagctgagatacttgcccttgggctgcatcataggctgccttactatcttgctctagccaagtctctgctcgtgctagggtaatcggtccgtcttccccagggagttgcaagtggccataaccaccagttatcttcccgagggagtctttgtaccattttagtaccaacccctcccttcgcttgattagatcaaggtacttaagaggctgggaaagaaatgactttagccaactctggctcttcgtcgagaattcgtcgaacttcactgattagatcctctgcggacatatcttccacattcttagtagtaagctccagtttctgcttagctccgaagcctccacgatccaggatatcctgggccgccttgaggcgaatcccacctttctcttctgggttgctagcgatctctacaaccacacgaagcgccatggggacatgactcccgatgcgctcagagataaaggcgttgatgtattcggcatgctttcgatggtatgcagctacgttgcgttgcgcatgattaggagagaacccagcggctatatatgcttgggttttgttcataccatctgccagagcctcacaatagaggtccagcttttctttagcagaaagaggagcagccccaatcgagacaaccttttcgtctgacatacactgctccgatctctctaaatggtcaccccggtaggactcgaacctacgacctcctgtgtccaagacaggcactctaaccaactgagctacgaggagttaatggtggtcgaaggaaggaattgaacctctagcctaaggcgtccgggttacaaccggatggtagtagccatctacctctacatcgacctctgttggctgggacggcagggctcgaacctgcgacctgagagttaacagctccctgctctaccaactgagctacatcccaatgaaatcttaaggtaatttctcaaccttataatactattatatcatactttttctattttgtcaagtcttttttcttctttttttattttagtcgcaaggcccggttttgttagggtttttgctggaatgggaaaggggttcttaagactatcttaagataaccttaaggtaactaaccttcttagtaagtaagtcaaaaggaagaaggaatcttaagagcctataggtctattatactacattttggataccttgtcaagcactttttgatatttctttgataatcacatgatttacccgacgaacggtatgatagggttctatagatataccctaagactacccttcgtaggttgctggtaaggggtaagtggcatagggttcccttgatccaggttctataggtataccttaggactacctctgtttgctatgtcctggcctattgccccctatccagtaatataccaacaggtatcgggggttgcctttgatccagggcctataaccgggggataccccaaaagtctattttatcctccggtgtatctggggaatatccccccaggagtcccccagataaagtgggggtggcctatccacaggggtatagcccctagcccctccctaggataccatgggattagtccgggggtcaacccttagacccttgggctaagccccctagagctaccgttcatcgggtggacactagggtattcataagaaaaatcttagggtattcaggaggtggatcggggggaat

SEQ ID NO: 70 - DNA, 67839 bp, synthetic construct
  source 1..67839: mol_type = other DNA
ttgcacaatcctaatagaaaaaatctatcacggacgttacctatctttaaaattaataaaattaatagtaatttggtaatttggtatactttagtatttgaaagccttgcggcactaagcctgtacacttcccgtcaagtttccgattccgctcaactcgcggcagggtcgccggaaacttccggacttccaatccatgggtcgcggcaacaccacggcggactaagcggcaagtgccaaaactcgacgaacggaaccggaaatttggaagcgcgatagaatcgctcagctggacatatttctaacattcgatttaacactcaatccaaacactcaccgccatcgtctcccgccaaccgccgactcgatcctcacccaccagcggatcgcccgtataacatcctataacaccacctaacactcattcatcatcaaacccacccagacctacagcccacccacaagcagcccatagacgcgatccctggccccatagtacaatcgcgccatactcagtgtcgcggcagagcaccaggggccatccgccaaccaagccaccacgacgactccagaatcgaactcagggacgcagcaccaaatgaccaaattctacagccccgacgatctagtcacgccacaggaattcgcagacccgcatttcgcggcgatcaaccaaaagcgattcgacctgtacatcgacctgcgcgtccaaggttacagctcctggcgggtcttccgggccatctggggcgaggagcatatggacggtcccgcgcaggcccgcatcttcgcgatggagtccaacccgtactatcgcaagcagttcaaggccaagttgaacgcgaccaaaacgtccgatttgtggaatccaaagacggcgctccacgaactcctccaaatggttcgtgaccccaccgtcaaggactccagccgtctgtcggccatcaaggaattgaacgttctggctgaaatcacgttcgtggacgagtcgggcaagacccggatcggtcgcggtttggccgatttctacgcatcagaagccgaggctcagaccgcgaccgtcgctgctgcggccgaagccaatggctatgtgccggaaggtgaagagggagatttcccgtctccgtctccggaaccgaccgaggaagaccgcgccaaccccatttagacataaaataacggctaaggatttaaggtaaggaggtttatttatgcatccgtttgaccaagctgtggttaaggatcctaccgcaagctatgtagatgttaaagcacgtcgtacctttctgcagagcggtcagctggatgatcgtctgaaagcagcactgccgaaagaatacgactgcaccaccgaagcgaccccgaacccgcagcagggtgaaatggttatcccgcgtcgctacctgtctggtaaccacggtccggttaatccggactacgaaccagttgttaccctgtaccgcgacttcgaaaaaatctctgcgaccctgggtaacctgtacgttgcgaccggtaaaccagtgtatgcgacctgcctgctgaacatgctggacaaatgggcgaaagccgacgcgctgctcaactacgatccgaaatctcagagctggtatcaggttgaatggtctgcggcgaccgctgcattcgcgctgtctaccatgatggcggaaccgaacgttgacaccgcgcagcgtgaacgtgttgttaaatggctgaaccgcgttgcgcgtcaccagacctctttcccgggtggtgatacctcttgctgcaacaaccactcttactggcgtggtcaggaagccacgatcatcggtgttatctctaaagacgacgaactgttccgttggggtctgggtcgttacgttcaagcgatgggtctgatcaacgaagacggttcctttgttcacgaaatgacccgtcacgaacagtctctgcactaccagaattacgcgatgctgccgctgactatgattgcggaaaccgcctctcgtcagggtatcgacctctacgcctacaaagaaaacggtcgtgacatccactctgcgcgtaaattcgtttttgcggcggttaaaaacccggacctcatcaagaaatacgcgtctgaacctcaggacacccgtgcgttcaaaccgggtcgtggtgacctgaactggatcgaatatcagcgtgcgcgtttcggtttcgcggacgagctgggtttcatgaccgttccgatcttcgacccgcgtaccggtggctctggtacgctcctcgcgtataaaccacagggcgccgccgcacaagcaccggtgagttaaagaagcgacaaagccccggactctagttcagaatccggggctttcttttgggtttcttattctccagcttcgatgatttcgaagttgtatttgacgccttcgtgctcgaaagtcaatttgccggacgctttcagctgcatgcggaatcggatgcacttagaggaaggcaaaccgaactcgatgaaggctgcgttgcaggatttgaactcgccgcgcttgcctttcacggtgaccgccacgccatgacgctcggtgcgcttgcgggcgacttccgggtctttccaggagttggcgatggctgctgacaggtctttggtctctttggttttctccggcgcgttcttcgcctcttcgcgcattttccggatttcttccagcgcttcctcttcggtgatttcttcttccggcttcagattctcttcggccttctcttctgccttcttcttggaagtgcgggttttgtaaaccttggccggggtttcctcttcctggaaggcctcttcctcggccggcagagcgttcaggatggcgaggcagcgacgctcagcggtcttgcggtcagagaagcgcttgacagtcgcatcggcgttgtgagcgttgtagaaggcgaccagttctttcatttctgcgttctggatgtcgccgaaggttttgatggagttggtcattttgcgatcctctgttttggaagatttcgtttgggcttcagtttgtcgccccgttgaaagagattatgcctaggtcgatgctgcgtgtctacatctatttcatcagattgatcacaaagccgacgaacggttgtctgatgtgaaaacaccgcagagcaggctgcggtgtttgttggcgttggggtgatgtcagaaagtcgggactgtgataggctcgatgggcggatcgccgggcctgtcgttgtccgatgcgggcgccgggctggaagggatcgcacccgaccgaagcgccagcgattccgactgcctgcttacctgcggagctggaggcgcttttggcgcatgaggcgcgggcggaaccggcaggcctggaggagccatcggcgccctgggcggctccggaagatcgggcagatcaggaagactcggcgctatgccgccaaaggaccgctgcgaccgctgcgacggattgtcgccgaacatttcggcggatcggttgtccttgatgacttgacctatggccgtcttgtcgccacccggttctgctggatcgaagcccgtgaatggagtggtaacgcagcgcatgttcggatgggtcggcagattgttcaggacgatggagtccgcccagacatacgggtttttgtggttgccgggtccgtggctgatgatctcggcaggaatatggccgttcatggtgagccattccgccatcccttgccgagtcagcgggcttaccacgatctgaccagtggactctttggcgatggcgaacagatcaccgaattcgaatccgatgattgtgtagttggacctggactcgccgacgaaagccagagtttcgatgttgtggtggatatcttggtcttcccagatgtacagcatggttcgctcctcaataaggttgcttttggtgttcgaccagagacataccggccggaactttgaagcggacgtattcgatcatcatcgccgttcgacgccgattcgtgcccgactcgtcattgacgaatagttcgcactggtgcggaatgactcgcgtcaccaggcactcacctttcgagccgtagaacttgctgtaggctgcgacgcctcgcgtcatgttcagacggatcgtttcgcagagtcgctgcgcggccgacgcgctggacagatcggtcggactgaccgtcacccagtaatggccactttgttctttatcggacataagctgccctccaatgagaaagcctctgccgagtcgcagaggctggttgttgttagtcgcgcttcaacagaacgactttgtcatatgcgcgatatttaccgcgccagtcttcccagtagtcgccggccgggcaggtaagctccagggtgatttcgtcgcgccagcattcgacagaaaggacaatcgccttgttcctggctgcggaatccgccctgagcttaatcagaatttcgtcgccagttttcaactcatcaactcttacaacttttgccatggtgttctcctattgggcagcgccgcgagggcggatcgggtcgatgtcatgtaagcagatggtaggatagtccctggccaacttgagcttgaagtccacccagtcagcgccgacaagtgccgagacttcgacacttattttgttgtgcggagcaggactggtgcgcaggactatggcccgacgccgaacgggatcgttgacgtcaacatgagtgagtatttcgtcgccgacgagcaactcacaggccatcaatattttggccatcatacactcctatgagaaggcgcggccaggacgatcccagccgcgccgatggattaacgtttgtgaaggatggacactgcgtccacgtcgaggatgctaatggtacggcgacggcgcggattgctgcgttcatggatgcgaatcaggttcgcagctggagcttcgtccaccacccatacgtcttccggtttctgcgtccggagcaggaccgtcacttcagtattctgggcgaggccgttgcagatgaaagtgaacttggacgagggagttctgtacatttcgagattcctttttggacttctggttcggcttctcagccggtgaagagattatgccctgattctcaccgccgagtaaagcatttgtgtaccaattctcccgtcaggtggaaccaaagtgcggtatcgcttatggctacgctaccgcgccatggcccttcttgctcgcacactgcgaaccacaggctgatttccatccttgccaggactcggccgaaagattcgaacctgcgccgactggacaggatgtcgacattcactcgtcgattgacctcataccggcgaccgttgatgacgaagaccagccgcagggtttgtccgtccagacattcccagtatctggtttcataccgaagccagtagcgcttgccagccgggcctaccatggtcatttaatcgatgctcctggccgcgccacgcggtccggtcggcgggacgggatcgaaccgacccaggatgtagtcgggccggcgcgcttcctgaggacacacggcgagaaggcgccatcctgcgtccagggcagactggagttcgtccgtgcagcagtcttccttgagcagcagacggttgacgttctggagattcggaccaggtatggccgatcctgtgagtgagttccaaccctcgattccactcaccatctccggttggttgatgtagcttacggacataccggccaaccggctcgcggccagctccagacgctccagcatgggtcgcagagcagcttccgggtcaatgtcgtcccagagaaggaccaggctgatgatggtatacggatagtccttgtccagatcccaggctgaagcggtcagacggcccaggccgatttcattacacatcacgggaacgtcgttgctccaggtggacggctcccagttccgctcaccaggattcccgattgttacgccttccaggttccccaggagaacgtggagcttgctgacatattccgcctccaaggctttccgctcttcgtcggtcttgttgtggcgatagaaggatggagggctgactttggcatggtagagtttcataactgttcctcggttttggaagatttgaaagttagagaatggtgtcgcagtatttctcgaaaggactctggcgcttcttctcgcagatcgcgcaggtgatttccaggtcgggcagctcgctgtaagtcttgccgagatacagccagcgcttgcacagactgcggccgtccgacgtgaagaagtggactttgcgagcattgccgggttgcgcccagccgcttggtgccggcttcctgctcataccatcaccacgtcaatttcgtcggcgaagaagttaaagccaactccatctgcgtagccagtgtaacgcagacgaatcgtcccatcaatgtgggcttcctcgacgccgatgacttccagggtggtatcgttgcagtacagcttgacgaacatcttgatgccggagccaatcgccgcgaaggcgatctgcttgtacaggtcttgcttgatcatgctttacgctcctgtttgcggatgtattctgccctgacttcggcttcgaacttcgcccagagcgcgttgtctactggaccccagggaccggtctgagttccgtccaccggttcgaacttgccaccggcgcggcgatatttggacagagttttcaggctgatgatcttctcatcttgggaatcgaattggacgatcatttgacgtacttcccgaagtagcaggtgtggatgatttccagaccattggagatagccttcagcttgatgccgaaattcttgatcgcccagtccagatcgtggtgatagaactcgatgatgttgacgatttgaccggcgctgtagtggatgacgcgaaccttgccgttccagcggaagtcttcgcggctgtttacggcctcgactgcgatggtgtcgtttctgccgatgttccatttggagctagtcatgtcgcaatcctctttttggagtgtttcgcgtttcgatgaggtaactatacctcagtcacctcatcgagtaaagcacttttgaacatattatctgaaatttctgtgagacggatccatcggcggattcagtcagtggaaccgagactccatccgttgcgggcgaaggccgagcgaccagacagcttgcggcactggatggagctgccatcgtcgaaggtgtaagatacggcccagtccaggcgctcgcgacgcactgacgccgcagcgatatcttccagacgggctttgagaagctgttctgctttggtcatttcgagttcctctttggggcgcttcgtgtttcgatgagatgactataactcagtcacctcatcgagtaaagcgcttctgaggaattatctgaagtttctggaggccagaaattgccgccagagccagtcaacgtgatcgttgaggtagcgctcgccatcggacgacagagccaggcatccatcctttatgccgagcttggaactggaaatccattcgaactcgaactggagcgttcctgggcgagggatatgggacaggctgtacttttgcacggtcaggaatcctctaaaggtttggagttcgcgatggacgcgactttctgcatgccgatgcgatagaattcggcctcttccctggccttggccagctgctccctggcttcgcacgccagcttgtgctggttattggcattctggatgcttccgtccagactcctgtccaactcttcccgaagagccttctgcgacgctagctcggcctccaaatcctggattctgatctgaagctggcgattcctttcagaaacatcgttttcgcgagcgatggaattctgaaggcattcgtcaaggcgagtattttcgcgcaccagttgatgcttttctactttcgcctttctgcacgtctctcgcattgctgaaagctcactcgcatgcagatcgtcatccgggtctttacgctcttccttcgactccatccgcaggtagtactggccggctgcgaaggcgagcactgcctggtcggcatacgctgcggcatcggtcatgtatctggatttgtagcgaggcagaaacttgcactcctctggatcccagaggagactatcggcaataggccagaatttgcggaaaccatcaggatcgacttctacattgaccatttgcagctggccggcctccacttcgacttccagaggaacctgaatagtgccggtgatgtactggaagtacactatgctagacataacacaaactccatgagaagtcgcggccgggaccatcctggccgcgcatcgtaatcaatcttcgccttcgtccgcgctcagccactcttcgaaggcgaagtttaccttcgactcgacccaatcctgaagctcatcggcgaactcgtcactgtcgatgtccatggtgatgcccatgacttccatgttccatagcgcggcattcagttcaaactgcaccatccgctcgccatcgacttccataaggatgcggtctgcgacttcatagtcgtctacatcgaacaggtggccgccagtcaggaggtgctggacgaaagcttcatcgaggttggtgacttcgatctggacttgtttggtcattttctgcgatcctctgttttggagtttgggcgcccggcgaaccggggcagggtgtttagcgcggagagtgccgatcttccaattttcaagctcgtcttgcgctgcgatctcaatatctaacagcgcttcctgccgctcgcctgccgctcgcctgcggtaagggtagagttccaagccaaatccttgatggccttgatgatttccttctttgtcatggtcatgcccgtggctcctatgtgcggcgggttggttaggcgaacagaaggcgattgacagcagcgtccacgtcccagccgcaagcgaacagcgccatcgcggcttcgtattcggttgcaaagccggtgtctgccatgaccacttcaacggcggttttgctgtaatgctttgaaagtttcagggcggcgagagagtccgctttgtcggccacagcacaagcctcttgaacagtttcaaatcggcccacctctttgcagcgattttccagaacggcccagccaaagacgttaccagcgccatcagtgattttgtgtactgtgttcatcgtcttaccctccaggtgtttgttcgtttcgatgaggagattatgccgatagtcagaatggaagtaaagtgtctgagtgagaaaaattctgcacaccgacgaacggttgtgctcgaccgtctgctgcggtgtcgatatactcggcctattgcgaacaatggactgattaaatgtacaaactcaatcctgcgctgcgagcggtctggcgaactcgtgcccgttacaaagtcatctatggcggccgggcgtcttcgaagtcacacgacgcaggcggtatcgccgttttcctcgcggccaactacaagctaaagttcctctgtgctcgccagtttcagaaccgcatcagcgaatcggtctacacgttgatcaaggacaagatcgaaaactcagagtataatggcgaattcatcttcaccaagaactctatcaagcacaagagtaccgggtcagagttcctattctatgggatcgcccgtaacctgtcggaaatcaagtccaccgaaggcatcgacattctctggcttgaggaagctcactatctgacccaggagcaatgggaagtcatcgagccgaccatccggaaagagaactcagaaatctggatcatcttcaacccgaacgaagtgaccgacttcgtgtatcagaacttcgtggtcaagccaccgaaagattcctgcgtcaagatgatcaactggaatgaaaatccgttcctcagtgagacgatgctcaaagtcattcacgaagcatatgagcgcgaccgggagcaggccgagcacatttatggcggaattccgaagactggtggcgacaaatccgtcatcaatctcaagttcattcttgcggccatcgacgcccacaagaaactcggctgggagccggccggatcgaagcgcatcggcttcgacgttgcggacgacggcgaggatgcgaacgcaactacgctcatgcacggcaacgtcattatggaagtggacgaatgggacggcctggaagatgaactgctcaagtcgtccagccgcgtttacaacctggcgaagatgaaaggcgcctcggtcacttatgactccatcggcgtcggcgctcacgtcggatcgaagttcgccgagttgaacgatgccagtcccgacttcaaactgatctatgatccattcaacgcgggcggcgctgtcgataagcctgatgatatctacatgaagctgccgcacacgacgatcaagaacaaagaccacttcagcaacatcaaggcgcagaagtgggaagaagtcgcgacccgattccggaagacttatgaagcggttgagcatggaaaggtttatcccttcgacgaattgatttcgatcaactctgaaacgattcacccggacaaactaaatcaactgtgtatcgaactttcgtcgccgcgcaaagacctggacatgaacggccggttcaaagtcgagtccaagaaggatatgcgcgagaaacgcaagatcaagtcgccgaacatcgctgactcggtgattatgtcggccattctgccgatccggaagcccaaaggtttcttcgacttctaaacacagaaaagcccggatcgctccgggcttcgggtcttactcggtgtggttcctggcgctgagtgtcgacgcaacggcctcgccgactcccagggcttcctggccggccgcgagcgcttcggcttccgactcgacgatgaagtcatcaccttggccgtcgcctggcggaacctcgaccagcacggcttcttcgccttcgaaccgcaggtcataagtcttttcgacggacagtccgtaacgggcattgagcgcatcccagagctgagcttcatagttgcgcaggtcttgcagagatttctggtggctgagcatcgccatatcgacggcccgttgcagggtttcgtccaggacgttgaatcgcatgcgaagagaacgaatccgctcgaccacttccgcatccactacatgtctttcgatcatcgcttttcacctttgctgaatgttacgttgtagccattgtcggccaggtaggtcagggcgccttcgaaggaagttccgacgagatgcttgagctgcatttcgcgttgcgcggcgatccagaatgccgttccggagaactctgcgtggccttccgacaataccttgccatcaggcccgtcgatccgaacgtgaacggaagatagcttcagtaccatcaatgaatccctccactggcttgcgacggcatgctttcagcgcgagcggcttcacagtccgggcagggacaggcttggcggacgcgctccaactcgtcggcatccatgacatagagcttcccatcggaagtgtcgtgcgccatggcgatgttcgggaagtcggcagcgctcaggccggcgacagcgcggatttcgtcccagagcgccacatgctcggcattcaggcgagctgcgagcgcttcgtgctctttcgctacacgagccatgaactcgtccatccggaatgcgaattccgcatcgatggatcgggccgaggccatggagttgaggcgaatcggttctttcttcatggtaattctcttttggttggcggttgttcgctgctcaggcctattacagtctgagcagcatgatgaagatgaacgcaaggaacgcaaacggcacaagtatgccggacatcagctttgacaggcgctgcatctcagcgtatttctcggttgacattccgtgctgcgccgcctcagctgcgaagcgggctttcgcctcgataacttccgggcgcagcgacaggacatattctaaggcctcttcccgcgctttttcggcctcgaccgacctagggtcgcgggccgagacttcgctgtgccctggcctcgcgggatgggcctgcagcgatggaggaagttcggcggccacgactccatagtcggcgcaggcccaagcgatcccgatgaggatcgcgaggatggattggacgattcgcagcataactttgtcgctagggaagctcatgatcaatcctccacagaccgaacgatttccaggttgcgcccggcattggtcccggcattgaaggcgcgccgaccgtcgctatcgtccaggcgcatgagcttggtaacatttgacttcttgtagccaggatcgccgaaatgttcgtgcaccgcagcttccttcaccacaaccagagacgttccggcagaagataccagctccatgcgcttcctggtgatggcctgaaggcgatagctgatttcctgggtcgcggccagcttgaattgcgcggcaaccttgacgttgaatcgtccgtatccttgagccttctgatactcccggcacagacgatcaaccgcttcgacaagggagttgaacatgttcaccgccagctcaacgtccgatttgtagcctttaaagcggacggcatgcccccagcgcttcgtagtcccgccgtttgcggcgtgccaagaagccttggcggtcgctcggtgatcgttgatgccaccggcgaaatccatgatgcagtcgttgtacgtcgccacggccaccgagaagaacttcatccagttcgggattgcggaatagtaacgagtcgcgatctgctcatcgaactcttcgcgaatctcgccggtcacttcgaagtcgtgaaggtcatatttgtccttcagcttcttcacacgctcggctgcaatggcggcttcgtgcgggctggaggagtcggccgccatggcagtcagtttgcggatgcggtctttcgccttctcgatggcttccggggtgaattcgttctggtcggtcatggtcggttcctttgtctgaagggtttcgcgtttcaatggagctattctgccttcattcagaattgaagtaaagcactttcttccactatttcggcatcgactggaagaaattccagatccaatcacctgctaccagcaagaggatgagggcggcaaagaacaagacagcggccgcgagctgtgcgcccggcttcagtttgggatggctgagcttgggctctacgggaacggccggagcgctagcgctgcaaccggcgtctcctgggccgtagccgatgccgcgttcacacgcctggagcgacaccagggatttaagatactcggtctgcttttgcgactcttcgtagatgccggcgacggcgaaccagagggcgaacactacggacgtacacacaacccaggcgccggtcagcaggagggccagcgggccgatgacgaagacggtagcagccaggacgattgcgccgccccagatgatgaagccggccagaccattagtgatgtcgacacagaactttttcattttcagattccttcggttacgggatggaggggatttgaaactctgcgccgccgagaacatcaatgacgacttcccagagcgtcggaacagaccactggtaacggtcgaagtcggtttcaggatcgacgcccagcgtcacataggaagtggcaggccatttatgaacactgcctttccgcatgagagtcgccacgcggccgtcaccgagcggattcgttctgtgcggaacgtacgcagacatcgaatattgctgcccggcgtcgacaacaaatctttgcctctggcgcagacatacagagcccacaggattccagccgcgaccgccgcaagcctggcgagccgaagagtgttcataaccttcgtgagtcatttcgccgaggcaagccgagcgatcctcgtaatagttgatgttctccatcgatccaaccagtaccagagactcgaaatcgaatctatgatcgtggatggccgagtgattgaagcaaagccggcgcggcaactccgggtgccaaacatggaggcgccctgccgggagctggacttgaatgaaccccaggccgtgcagcgtgatcttgtccttcatcgggtcatggacggtgctcatggataatcctcagtagcagaaatgtatggtgagagttacgatggccaagccggtcgcccataggagggcgaaccaggccatggctttgatggttatgtagatcatccgaagaactttccggcacagatcggtccaatgcccatttcgatggatgcgtggttggtcaactcgcgaccgcagcaggagcattgaccagtcttccggccgtaggcgactgccgattccatcggcttttcaaacatcttcagaacgtcgtcatgctcagtgtcggtgcagtcgcgactcttgatgaatttgccattggtgatccggccgaggtagatgtcgcccaagacgtacaagctaccggcgttccggctgtgagcgctagcctctttcacaataacgatgagcggctcctcgccttcgccagccaggcggattttcgggcgcttgatgccagattctttcgccttctcaaacgccttctcgatgccggaaatgtccagagtcggtgcagcagcttcctgcgcggccactttctcgcgatatttggcgaggttttcgatggcgcgcttcgcagcagcgatctgattttctgtcaaggagccgtatttatacaacgactcctgaaggctctgagcgaagctgaaggaatttccagtccaccactcgacgatgtccgggtgcgcagcttcgaaggctttaattttgaggtcgcgctcttgcgcagcgctacatattttctcgatgcgcttttctgccgccttagcacgactcttggcgcgctgctccgggctggttttgtactctttgtatccaacaccgccgcaggcgaagcaggcgcgaccataagacgaagggccacggtacaggccggtgcctgcgcatttggtgcacttgtcgcgatacagcttcacttccttccgggaattcgggcgagcgcccatggacgcgtcttccagggtcttcggcgcttcgttgttgatcgctacggtagcgaagtcgtcacccaggtcttcgaagccggtgaacagattctctgctgcgttcatatcgattctcctgtttggaaagttcgtttcgatgggttgactatacgccagaaatggaaaacggtagcactttcgcactaccgttcgtcggatcgcagagggtcaggctacacggatcaactgcgacatgactgccaggttccgctcggcgacgccgatgatgacgttggttccgatgatgaacttccaagggtcttccctgttcttgtcgtagaacggatttctgaacagggtccgccatgtctcttcagtgaagaacgttttatggtccaggtcttggtgggcgatgttggagttgtagaatggaacaacgacattgagcgtcgcgccgactgccatggcccgctgcaggtctttcaccaaatcgatgacctgggctccggtgagatgttcgaagaagtgaaatgcgtagaccgccgtcaattcgccgtcttcatacggcactcggccgctggcgccgtcccagttcggccagtcgagcgattcgacgccgggaatcggcgaattgcctgcgcccaggtttactgcgcggcggtgatccggctcgatcaactgagcgatgtcgcgcttcatgccgagtttgaacaggttttgaatatccatttggttctccaggttgctgttagtaaatgtcgctgttgatcttgaatccatgctcagcgccgtcgttgtggtcgtactcagcatagctgtcgcagtagtcattcaaatgctgaatgatgccaagaacgtcgttcgcggccttgtgccgtttcgcggcgatggtcttggcgatgttgtcgccgacttccagggtttcggccgtccggcgatggatcagcaggcgactccaaagatagagccggacgcgacgaatgatgtcgcgatggcgctccagtcgtccgtgcaactcttcaatttcgtgctcgcgagattttaatactcgtcgaagctgctgaacttctaattccaaatcggccttagtagccatgttcacctcaaaaaggaaaatcgtctgggactccaggaagctcgacgactattgttgagcctgatcgatctagaatgcatccgaccgagccagccctgtggggatagggtctacacgaactataacaggtgacttccatgactattcgccaggtcgatcctccacaccatctacaaattggcggtcgcttcgacttcagttttcgttcgtccaagacggcgcgtctgtcgcaggaaaggcagcgcgccttaaccgacgtaaccatgggtatagtcgatcattcggatgaggccatcatcctctgattccctcgacttcagaccgcccaaagagtccgactggccgttgcatttcgcatcgatatccatcgaagacaagaatcctgccgatactacggtgatatcaactttgtcgccggccttcttgaagtcttcgcactcagcatcgagggccacaaccgcactcgcagccatgttcacatgacttatgaggtcggggaagatcacaggaacttcacgcgacatgccacggaccgtcatcttcagtactacatacttcatactcactatcccttttgtatgtgaggaaagaatttgctgttttccggatggtggaagcgctcggccgcaggctgtctttcttccggacattgaatcgtcgaaggcgggaaaaccgcgccggcgataatcgccgcgaggagtgcagcggatgtcgacatccagagggcggtttccaggctcacccgaacttccggacggcgcggcttcattcgctccaccctcttcccggttcataggatggtagactgccgccgcgaacccagtcgtcccacatgtggttcagaccagtcggtggctggggcggcggactgtagaatccgggagtctcagtgctgctcaggaaataaggtgtgcaaacggcctggacggccagttggtgccgctcccacatcttatcaatcgctcttagcatgacgtcttcgcactgagtcttactgtcgaaccgtctgctagtatggtccggtatctggacacatccgtctccagtgcaaaggaaagcagtagcaatccatacggtgatactcgccatttcgtcacctctttagttgatgagcagagtctattccatctgctcgccaggagtaaagcgcttttcgtcgggataaatgccgatgatgtctgcgtcgagcatccaaatgtccacggacggatcgtcgctgctgatttgatatagattgtacagctcccgtccgcctacagcacgctcgcctcgcggctcaaccgccagaaccttgccgtggccttctccgtgctcgtccaggtatatgacgtgatcaccgacttcatagctttctttcgtgacgaggcgtgaacgcgagttgttctgcgattcaaccacccaggaatccagcacgccgcctttcatgtcgcggaacaatcttgccgatttgtcgcaatcgaacacgcccagaacttcgccgtctttcaacacgatgtgtacgataggaagaagagtattcatgtttaatctccattgactgataattagagtctaatctgccgaaaagttcccgtaaagaattatttctcagaactgattagttgtaactgttaatctgatgtatgtgtttgaatctcttttgaacgtttgatgtttcccctataataagcgcacacagccaacaaccacgtggaactacaatgtttaaactttcctggatattcgggcgcaaaaaggatagtgctgcctgttctgaatcggcgccggagaaagtcgcacaaatccctcaacacgatccgctcgaccctatgattaagctgggcagaattcgcggctggaacgtcgagccggagaaagccccggtcatccgtagcgtgaaggattttctggaaccgggcctatccgtcgcaatggacagcgcgtatggtgacggaccgactccggccgcgaaggttgctgcgggcggccagaatccctatgtcgtcccgaccatgctgcaggattggtacaactcccaaggtttcatcggacaccaagcttgcgccatcatttcccagcactggttggtagacaaggcttgttccatgtccggcgaagacgccgcacggaacggatgggaactcaagtcggacggccggaagctatccgatgaacaaagcgcgctgatcgcccggcgcgacatggagttccgcgtcaaagacaaccttgtcgagctgaaccgattcaaaaacgtcttcggcgttcgtatcgcactgttcgtcgtggagtccgacgatccggactactatgagaaaccgttcaatccggatggaatcacgcccggctcctacaagggaatctcccaggtcgatccatattgggcgatgccgcagcttactgctgcctcgacggccgatccgtctgccgaacatttctatgagccggatttctggatcatcagcgggaagaagtatcaccgcagtcacctggtcgtcgttcgtggaccgcagccgccagatatcctgaagcccacatatctattcggcggcatcccgctcacccagagaatctatgagcgcgtgtatgcagcggaacggacggcgaacgaagccccgctgcttgccatgtcgaagcgaaccagcaccattcacgttgacgtggaaaaggccatcgcgaatgaagacgctttcaatgctcgcctggcgttctggatcgccaaccgtgataaccacggcgtgaaagttctgggaattgacgaaggcatggagcagttcgacacgaacctggccgacttcgacagcatcattatgaaccaatatcagctggtcgcggccatcgccaagactccagccacgaagctcctcggcacttctccaaaaggattcaacgccactggtgagcacgaaacgatttcttatcacgaagaactggaatccattcaagagcacatattcgacccacttctcgaacgtcactatttgcttctggcgaagtcggaagaaatcgatgtgcagctggaaatcgtctggaatcctgtagactccacgtccagccagcaacaagccgaattgaacaacaagaaggccgctaccgacgaaatctacatcaactctggcgttgtgtctccggatgaagttcgcgagcgtctgcgcgacgatccgcgttccggctacaaccgactcaccgacgatcaggcagaaaccgaaccgggcatgtctccggaaaacctggccgaattcgagaaggccggtgcacagtcggtcaaggcgaaaggcgaagccgagcgagccgaagcccaggcgggagccgtagagggcgcaggcggcccggttcccgccgctccacgcgcgactaagcctctcgcgaaggcggccgaggaaggggccagcgaggccgctgaaccgccgtcgcggccggaccccaaggccgagctgcggaacttgttggtcgatcttttgtcgaagctccaagacctggacgacattaaggcgccggacggcgtagacatagagcacaatgatgcgcctggcttaaagcgcacgtccaaacctggcgtgtctggcatggagccttcagtgttttcgtccaaccgcatcgtcgggcctcgtgatcattcggaactccagagaatcaaggtgaatggaataaccaccttgatcgaaaatccgcgaggaagcattcgacaaggaaaggatgggagttggcgagttcagatgaaacaccactacgggttcatcaagggaacgaaaggcgctgatggggatgaagtcgattgcttcgtcggtccgaatctgggatccaaacgggtcttcgtcgtcaaccaggtgaacaaggaaggtcagtttgacgagcacaagtgcatgctcggcttcaacaacatcaacgatgcgaagtccggatatctgtcctgcttccgtccgggctgggatggtctcggctccatccatgaagttgacctgcccgctttccgtcgctggctggcgaacggcgacaccaccaaaccattcgggggcgagtgatggcattcaaggcctccaaaaagcgcgagcgccgggcacctcttccagtcggaagagggaagcccataattccatcggcaggaatcgaggcctggtatcgaaagcagatgaaggatatgtccaagctcatgatctccgactatcgaaacgagattgagaaggcgctgtcccagcctgcggccgaacggttcttcgccagagacgaatccgttaacgtcctgttcaagatgacccttcgaagcctacagcagcgatggagccgcatttttgaaggtttcgcggccaagatcgccccagagttcgtcaaccggaccgaagaagccgccactgccgcgacccttcacagcttgtcggtggccggcgtcgatcagccacgagctgcgtataatgagagcgtcaggaacaccctggaggccgcaaccacttacaatcatactctcatcaccaagatccaagaggaagtccacgagaagatttacacatcagtaatgctgtctctgacttccccgaatccggaagagcaaggaacttccggcataactaacgcacttcgcaaagtcgggaagttttctgaagatcgaatcgaactcatcgcaagagatcaaacaagcaagctttacagttctctgagcgatgagagaatggcggaaaatggagtcgaggagttcgagtggctacactcttctgccggcaagactcctcgccacacccacctggagaaagatgggaagaggttcaagctgaatgaccccagactttgggagggtccgaaagcagaccaggggccgccaggatgggcgattaactgtagatgcagaaagataccagtcatttgacgtcgataggagcgctatatgccgttagttcatggcacttccaatgaggctcgttctgaaaacatcaagcgggaaatcgaagccggtaaagacccaaagcaggctgcggccatcgcttattccatccagcgcagtgagaaagggaagacggcgaaagattgttcgcctgagctcgtcgccgatcttcgcgccctggtggacgctctgtcgaggctcgtgaaatgaaccgcaagacgtgccggcgccgactcgtggtcgatgtaatcagggccaatattcacggcggattcttcagcctgaagtttgccgccatcgatttggcaatcatcggcttcgccatcttgatggcttttggccgatgatgctgagaaaatctggattctgactaaaaattctagtccggatagccgcaaattaccgtttacggaaaatggcagtaatttggaaatcctactgccgcgaggctttaacagagccagttcctaatttccgatttagccgcatgcttcaaaagtatatagcctgggaaattagaagtaacgttccaatagaattcatctataagcaacgttataatataacgtcaatctatatgctctagacgtattgaaattcaatttttaatcggtaaattggtaatttgaattagtttagaagttgaaagtctcgcggcagtaggcttagacaaatcccgtcaagtttccgagaccaaattaccggattttcgcggctgaggaaactggtaattagatcataatacaaattataatgtaagttaacagtcgcggctacatctaattattgttccgcttatttacccttagatgtactgcgtatataatacagccatagtccacgactcttcgaattaacgatggcaaagtcgaaaagaaaaattgacgaaaatggatatatgaccatagagggctgcccgatcagctcttatggcgttttccaatattctgctggtcaactcggtcttccgggcgatccgacgcggattgtcaacgtatatcgcccggagtctgccgtcagcgatccggagtacatcgaatctctgaagaatctcccgttgatcgacgagcatgagatgctgtcgggattcgacgatgatgacgatagcgtggcccccgaagacaaaggggtggagggcatcatcacatccaacgcttactacgaagccccatgggcacgcggcgatatccgcatctattcccgcaacatgcagaatcagctggaaaggggcaaagaagacctgtccctaggctatagttgccgctacactgagcaacccggcatctggaacggaacgccttatgaagtcgtccaggacaagatgcgcggcaaccacattgccctggtaaaagagggtcgtgtgccgggggccagagtattggatggtctgtgttttgaccatctcagttttgatttcagaccatccgatgagggtaatgaaatgagtctcaagaaagccaagcggaagccccctgtccagcgcgtagggcaagctgctgactcggcggtcgaagagttgcgcgccctgtggccgaagctatctgcgtctgtccagaagttcctgggcgaagaagagcaggagccggagcatcaggaaggcgcagctccggccgaaccgaccgacagcgagcacctgaccgagcatccgactctggaaggtgctcagaaggatgacgaagagcaggaagaggagccttccgttgtcgatccggccgtggccgccgtcgagccggagcatcaagaaggtgccgcatccgaaatgtccggtgaaggcgaagtcgccgaactgatctctcaagtcaaggccattctggctcgactggagggcacggtagccgaaggggcggacgaagagcatggcgaaggtcaagatgtcgtcgagggcttggaagagcagagcagcctcagcggcgcgcaaaccgccagcgacgatggtggtgagggcaaggataacagcgaggaacttcctgaaatggcacagaagaacgcgcaagatgctgcaattcgcggtctctatcgcgacattgctgctaaagatcgcctctacaagcgtcttagctccgtggttggtgcgttcgatcaccgagctatggactcggctgaagtcgctgtttacggcgtgaagaagctgaatatcagctgcgcgaagggccaggaagcactggcgctcgacatgtacctgaaaggtgtcgaagccgcgcgcggcgcggccagccgtcaatcgaaagcccaggattcggccggttctgctccgcagtgcgccgagctggacagctacctgaagggggagtaactcatgttccagaaacaagtttaccgccagtacactcctggttttccgggcgatctgatcgaggacggcccgaagcgggcgcggccgggtcgaatcatgtctctgtctgccgtaaatccggctgccaccgccaccggccccaaccgcatcagtcgcgctttcggttacgccggtgacgtcagctccctcggcgaaggtcagccgaagactatcgcggctcgcgcttctgaagtcgtgatcggcggcgccaacttctttggtgtcctcggtcatccgaagcactatgcgctgttcggttcggccggagactccctggctcccagctatgatctgcccgatggcgccgaaggcgagttcttcgacatggccaccggcctggtcgtcgaaattttcaacggcgccgcaaccgccctggacctggactatggtgacctggtcgcctatgtaccaaacaacctgcctaccgccgacaacgcgcttggcctgccggccggcgccctggttggcttcaaggctggctccatgccgaccggcttggtccagattcccaacgcacgcatcgttaacgccatcagtctgccggcccagtcggcggggaatctggttgctggcgttaccatcgtccagctcacgcagtaaggaggcgtcatgagccagatcagcaagacccattcgcgcctcgcaggccgcaatgcgaaacctttcgacctgaaaaacatcaccaatgacgccgtggcgtctctgcgccgcatcggcctggtattcgatcacgccgtcgtccaggaccagatcaaggccttggcgaaggccggcgcgttccgctccggctcggccatggacagcaacttcaccgccccggtgaccacgccgtccatcccgactcccatccagttcctgcagacctggttgccgggcttcgtgaaggttatgaccgctgcacggaagatcgacgaaatcatcggcatcgataccgttggctcctgggaagatcaagaaatcgtccagggcatcgtggagccggccggcactgcggtggaatacggcgaccacaccaacatcccgctgaccagctggaacgccaacttcgaacgtcgcaccatcgttcgtggcgagctgggtatgatggtgggcaccctggaagagggtcgtgcctcggccatccggctgaacagcgccgaaaccaaacgccaacaggcggccatcggtctggaaatcttccgcaacgccatcggcttttatggctggcagagcggcctgggcaaccgcacctatggtttcctgaacgatcccaacctgccggcattccagaccccgccgagccagggctggtccactgccgactgggcaggcatcatcggcgacatccgcgaggccgttcgccagctgcgtattcagagccaagatcagatcgatccgaaggcggaaaagatcactctggccctggccaccagcaaggtggactacctgtcggtaaccacgccttacggcatttcggtttcggactggatcgaacagacctatccgaaaatgcggatcgtgtcggctccggaattgtccggcgtccagatgaaaaaccaagagccggaagatgctctggtgctcttcgtcgaagacgtgaacgcggccgtcgatggcagcaccgatggcggcagcgtgttcagccagctggtacagagcaagttcatcaccctgggtgtcgaaaagcgggcgaagtcgtacgtggaagacttctccaacggcaccgccggtgcgctgtgcaagcgtccgtgggctgtggtgcgctacctcggcatctaacagatgcctattcaccaaaggccgggcttccggcctttgttcactctgactctaactcggttgtaggggccggttagggcataattactaggactacgccaatgactgtttatatcgtttcctccatgactcaatcggtgtcttacaatgcgtatgacacctctgatccgtccaatcctcgcctccagcgaaagattctgattcgcggccgcgcaggcatcgcatccgaaacttccggcttcggcgacatgatttccgacgaggcaggacgtccgatctggaccccacagggcgattgcactgccgtgagcgattcggatttcgagctgcttcaggccaataagattttcatgcgtcacatggagaagggttatctgcgagtcgtgaagaccgacatcaccagtgaccaccagcggatttccaaagagactcgcaccatggagcgcgatggattccagcctctggatgctactcgcctgcagcagaaaatcaaggtgaccacagccagcgcttcccaggaacaagagttccggatttaaccgagggtttcggtatggtgattttcgacgaaaataagtttcgcacgctgtttccggagtttgctgatccagccgcttatccggacgtgcgcctgcagatgtatttcgacattgcgtgcgaattcatttctgatcgcgattcgccataccggattctcaatggcaaagccctggaagcgtgcctgtatcttctgaccgcccacctcctgtcgctgtccacgatgcaagttcagggcgcggctggaggtggcgtcaccgccggtggaacccaaggcggtttcatcaccagcgctacggtcggcgaggtcagcgtggccaagctcgcgcccccggccaagaatggttggcagtggtggctttccgggacgccttatggccaagagttgtgggcgctcctcagcgtcaaagcggtgggcggattctacatcggcggtcttccagagcgccgaggcttccggaaggttggagggacgttctggtgatccctggtgcgaatcttctgcgaatggccttcggggtcatcggtactcaaattgtgaaatatcgcaagtttgagcagcgagtgaagaatgatcaagcccagtatgtctccatgttcggggagcctttcgacctggcagcgtctgtccagcgagtccgacgcgatcagtatgcccagtttaatctggagttccaacggaattatgttatgatcttcgccaactttgatatggttgacttggatcgcaatatggccggtgaccagttcctctggactggaagagtttttcagctggagtctcaaggctcctggttttatcaggacggctggggagtttgcctggccgtggatatcggtgcggccaagttcaccgatgacgggaaaccgactttctaggtggtgtatgtttgacggcgaactgatagcgaaaatggttgtcgagctgaatgcggcgatggcatctgctcaagaggctttgcagttcccggattttgaagtcgtccagaaagctcagccgacccaacaggggacgtcaaccaggccgaccatctttttccagaaactgtttgacattcctcgcggctggcctgccaccgattggtacctggacaacacggcccgcaaatatgtggaaataactcgacagcatgtagagacgactttccagatcagttcccttcattggcagaatcctgaaatcactcacgtggttacggcttctgatatcgccaactatgtgagagcttatttccaagctcgatccacaattgagcgcgtaaaggaactggacttcctcattcttcgcgtgtctcaaatttccaacgaggcattcgagaacgacaatcaccagttcgaattccacccaagttttgacatggttgtcacttacaaccaatatattcgcctgtacgaaaacgcagcatattcggccgatggggtattgataggcatatgagtctgaggcgcgattcagagctaatcgccgcgcacctccagatgttaagagccatgcgcggcaggtccgtttcagccggatggtattccacggctcgatatcctgacaaggcaggcggatcggtcggaatacaagtcgcgagaatcgcacgtctcaatgagtacggcggaactatcgaccatccgggcgggaccaggtatattagggacgccattgttcggggccggtttgttggcgttcggttcgtcagaaacgactttccgggagaaaccgaggtaactaagcctcacagaattaccatcccggctagaccgtttatgcgatatgcttggaacttgttttccgcagatcgcgccgcaatccagaaccggatagccatgaggctggccagaggacagatcactccagatcaagctcttgcccagatcggcctggcattggaaggatacatagccagaagcatcaggaccgggccatgggtggctaactcagcatctacggtcaggagaaagggattcaacagaccgctggtcgatacggcgcacatgcttcaatcgattagcagcagagtaacataaccaggagatcatccagtgatcagtcagagccgttatatccggatcatttcgggcgtaggcgcaggcgctccggtcgcaggccgaaagctgattctgcgcgtcatgactaccaacaacgtcatcccgcccggaatcgtcatcgagttcgacaacgccaacgcagtcctgtcatacttcggcgcgcagtcggaagagtatcagcgggctgcggcttatttcaagttcatcagtaaaagcgtgaattcgccgtccagcatcagcttcgctcgctgggtaaacaccgccatcgcgccgatggttgttggtgacaatctgccgaagaccatcgccgatttcgccggcttctcagcaggggttctgaccatcatggtcggcgcggccgaacagaacatcaccgccatcgatacgtccgccgcgacttctatggacaacgtggcgtcgatcatccagaccgaaatccgcaagaacgctgacccgcagctggcccaggctaccgttacctggaatcagaacaccaaccagttcaccttggtcggcgccaccattggcaccggcgttctggccgtggcgaaatctgccgacccccaggacatgtccactgccctcggctggtccacctccaacgtcgtcaacgtcgccggccaggctgccgatcttcccgacgcggccgttgccaagagcaccaatgtcagcaacaacttcggttcgttcctgttcgccggtgcgccgctcgacaatgaccagatcaaggccgtgtcggcctggaacgcggctcagaacaaccagttcatctacacggtcgctacttccctggcgaacctcggcactcttttcaccttggtgaatggcaacgccgggaccgccctgaacgtgctgtcggcgactgctgccaacgacttcgtggagcagtgccccagcgagattctggccgccaccaactacgatgagccgggcgcttcgcaaaactacatgtactaccaattccctggccgcaacatcaccgtttccgacgataccgttgcgaacaccgtcgacaagagccggggcaactacatcggcgtcacccaggccaatggccagcaactcgcgttctaccagcgcggcattctgtgcggcggtccgaccgatgcggtggacatgaacgtctatgccaacgaaatctggctgaagtcggctatcgctcaagcgctcctggacctgttcctgaacgtcaatgcggttccggcgagcagcactggcgaggcgatgaccctggcggtgctgcagccggttctggacaaggcgactgccaacggcacgttcacctacggcaaggaaatcagcgccgtccagcagcagtacatcacccaagtcaccggtgatcgccgcgcctggcgtcaagtccaaaccctgggttactggatcaacatcaccttctccagctatatcaacagcaacactggcttgaccgagtggaaggccaactacacgctgatctattcgaagggcgatgccatccgcttcgtcgaagggtcggatgtgatgatctaatggtttgcggcggactcgatccgccgcaaccttccataaatggagtgaggaataagcaatgatcaacatttctgcgttcggctcgatctgccagttcacggcaagcagaactttcccgaacggattcaccgtcaccgagttcgccgacgatgccgatcccatcgacagcccgccgttcaccgctgccgataccggcgtcggtctcaacggtgacatggtagtttggaaccgggcgaacatcctggaagtagtcgtcaacgtcattccgaataccgagggcgagcgcaacctggcagtcctgctggatgccaaccgcaccggaaaggacaagtcgggcgctcgtgatgtcgtcggtctggtcgtggcgatgccggacggcagcaaaatcacctgcaccaacggcacccccatcgacggcgttctgatcaacgcggtggcaagcgtcggccgtctgaagaccaagccgtatcggttccgatttgaaaaagtgatcaaagccggtactagctgatgaagaaaattccgctgacagcagtccccaatcaagcgatctcatttaacgccggtagcagctattggaagattcgcctgtaccagaacatggacatgatgaatgccgatatcagtcgcgacggcgtgatcgtttgccatggggcccgctgcttcggcgggattcctcttctccagtacagccatcagtaccgacctgactatggcaatttcgtcttcgaccgcgacgccgattggacgttgttcggcgacggaatcaacctgttctatctggacggcgccgaattcgcagagtatcaggcgctcgccacgaggaaagaatgagcacatcaacgatcagaaccgggacgaacaatgatatccttttggacgacaatggaaacatggtcatcctcaggggtgtcgaagcgtgcgcccaggacgttcgggcggcgatgctcatgcgcaccggcgaaaatattttcgatgtgaactccggcgtgggatatttcgaatacatcttctcgccgcagaaaagctatgatgacgctcgcaaatccatcgcggatgcaattttgtcctcgccggatgtgaccggcatcgagcagctggacatcgacatcaccggggaagtcttcggcgtcgatgcgaaagtcatcaccatccacgggcctgttaccacaggagtttgaaatgagtaccatccgcatccaatacgccaacggcacccaactgttcctggacggcaaaaatccgccgcccctggacccgctgccctcgtttaacccgtctgtcgaagatctggaaggcctgggccgcgaaaagaacaccgacaagggcgactcctcgccggccggtcttcccgttcccccggtagacgtcgattccaatgtcgacaacggcggaaccatcccggctccggtatcgaccgacgctcctgcggccgaatcggccccggaaggcgcccaggaagctcctgcagcaggccaaggcgacgagaaaggcgccgaggaagccccgactaccgccccagtagaaaaggccgaggaaacggcctcgccggccgctgaagaggcaaccccggctcccgccaaggccacctctcgcaaaaccaccagcaagtaaggactcgacatgatcaacgtcagcggcttcggcacaggaattgtaatagtttccgcctcatcgttcccgatggggttttccttgtcgaagttcgctgatgatgagagtccgatatcctccaaagagctggagccgttcggatatgagatgctttatgacggcggcctattcgcctttgacaaggctgctcctctggaagtatctgtatccgtcatcgcagggagcgaggatgatattaaccttcgcatccttctcaattccaaaaagggatcattcagatttcttccgggaatcatcccggacatgacgactctcgtggccactcttcctgatggcggccgcaccgttctgtccaatgggaccatcctcaagggtccggccatcgacaccatacagaacaccggacggcgcaaaggcaacacgtacacttttgttttcggtagctatcttggcgcccagactgcgcgtcaagccatttctaacgttatccaatcggtactggaggtggtctgatgttagggattttcaccagcctcctaagttcgcgatctttttcgattgtggaccaaaacacaaaccagctagttgctgcggatttgaggataagccgggtcaacacccggttttcttctgtaggacaacgccacatgctggaagatggtacgaccaagatggattccagaacgatccaccctatggaaatcatcgtcgaagtattttgcccttcaattggtgtcgtcgatcagatcaatcaattgctcctggatcgcgacacactgtacaaagtcatcactcgcggcatggtattcgaacggatgatgtgtaccagcgaagcgctcaatcagactccggatgtgatatcggcgactcctgcacggctgacattctcccaagttctcgtccagaatcccaagcctataatgttccgaaatgcaggggactcttctatgatcgaccgagggctggccctagctgaagacgtggttggctcggccggcgatctgttcgactacgcagtgaacggcgtccagaacgccgcagacttgttctgaggtgccaattgaactctttcctcaagtctattctcaacacgcctactctcaccatacgcgatgatgttaccaaacttcctgtctggaagagtcttcaagtcaagaaagtggaaatttactcgccggcttccgtagtgtcgaaacctctggcgacgaaagaccagacggaagctcaagtgtacaccgaagctctggacattgatgtgaagaatggaaagatcatccaaccggtgcgactccgcatcaatgctatctgtccggacctgtccaccgttgaaagtatcatgaacgctttcaatgataacacctcgactttcgctatcacttctaagtcgatattggccgataaaatggccatcatgacgctcgatgtagatcagtctccagacatgttgaacgcggctgagatcaatatggaattcgagcaggttgagcctccagtattgaataaattcgatcctgcgttccctcaagatagtccgacttatggggtacagattcaatctctttctgatgctaatttgctggattttggcgccatcggcgattcgatatcttcggccgcaaaatcgctatataatcgcgtgaccagctacttctgaggatgtatcatgcttgaaatcaatcttcccgatggccgtcaaactcgcgtacaaatcgaggcgtggtcggcattggatggctgggaactccagcgccgtttcgtcgaattcgctgtcagccaagattccgacttccgccgctctttcaccatggaaatcctgggctatgcgaaagtgctgcttggcgacgatgacaccggcattccgctgaccaccgcggcagtcatcaacaaccacctcggccactggaagaacgtggaactggttttcaactctgttctcaagcacaatggcatcgacccggccacgcacgccgaccggccggactattgggaacaagtcggatcgcagatggccatcgcatttctggccgaggcgtccaagctcattggtccagcaatgaagatcgccgaaggactcgccaacaagccggagtgattcatgtctagtgatttggatgaattcatacttcggtatgaggccgatactgccagagccgagcgcaatctggagcgcctccagaaccagatcaggcgcgtgaacagcgcatcgacgagtggccttcaggatttgcgccacttcgcagacggcgcggccactgaactcggccgagtcgttccgcagatcgattctgtgacgagcgcgattcgcgggatgaacgcgcaactggcgataggcgccactggcgtggccctggtcgcggccggcgtcaaggcgttcatgaacaccagggaccagtacaatcagcagcgcatccaggcgatggacatcggcatcgccccggcacgcttggaagagtaccagagaaaattcgttcgccagtccggtggaaccatcagccgcgagcagggcgcggagatgaccaaaaatctggcagacactttccggcgtgcttatcgcgatattgggcgagtcggcccggaagcgcgaattctgcgtatggccggcgttgatgtcgggagcttccaaaagggcatgcgcccgctcaacgacatcattactgatctggccacgaaaatggccaagctgaagccggacgaaatttctgcctacgctgatgcccttggcgtctcgcgagactacctgagcaccctggctaagatcggcccggccatgggaaaagtcaccgagatgacgactgcggaactccagtccagggtccagggcgagtccaacattcagaaattcaacgatgctctggcgaatctcaaccagacgttcaccaccctggaaaaccgagtcggcgaaaagctcgcgcctgcgttcaccaagctgatcgaaatcatcgacaagatagtccaggctattcccaatgaagtggaaagcttcgcgaaggacaccaaatcccgttgggaagatggagtgctcgggaaggcgaccgttggcagtgatatcctatccctcctcagccccggcgccctgctcggtcgcctggcagcgtgggggactcgtcgcggcatggaagaatcagggctcatcgacaaggacaaggttcccggcgctcaaaccagcgaagacctggccaagaaacaagaagaccaggacaaggctactaagtccatgaaagagctagagaagctggctgaccagaccacgaagtctaccaatgattttgcggtggcgatcaacatgttcagtggcgcggtatcgtcgttcgcgaatgccgttgacgagcgccaagcttgggcagcctgggcgggggaaattggtcgggcggtcggtatgggaagcaccgcgccgacttcgcgggcaaccggcgtctatccgcacgcgatctatgatcagtcgaagagtggcgcggccggacaagtcttcggcgagccaatcggcgcccagtctcttcgcaatcgcatgttctcgccgcagcgcaaggcagagccggtcaccgttccatcgtacatcaacgatatcatcaaagatgcttcgaagatgtacaacattcctgagctggacatcaagaaactcatatacaccgaaagccgattcaacgccagggccaccagcgaagccggagcgaaaggcctcatgcaactgatgccggaaatcgccaaggcgtatggtatcactgacgtatatgaccctcgccagaacatcctcggcggaacgcgcctactgcgtgaaaacctagatcgagcaaatggcgacatgcggttggccttgacatactatcatggcggactcgatccgaagaactggggcccaaggactcgcgcatatccgggtttggtaatgagcgctccaatcgagctgatggaagaggctcagcgcaagcagaaggctgcggccatgaccgtcgccaacgagacgttcgccccggaaggcggcgacatggacattcgtccctatgatggcgggcgactggaaaccccagaccagggcaagaaggaagatgagcgccgcgaagcccgtcgatatgacgacagggttgtgcgaccggaaattcgcatcatcgaccgcatgccagaccgcagcgacggcgaaatcctcaagatgtctagacgtcaagaggccgaccgggcagattctggattccggaagttcccgaatcaagttcgcggcgagaccaagcagaacatccaggctcaactcactgcaggagccatcgcgcaagtgatcggcgttaaccccaaccagatcatgcgccgcgaaatcagccgttctgacttgctgttcggatacaaccaagccatcctgggcaagcaacaggagatcaaggccgccgcgaccgaagccaacaacgtattcctgtctccagccaagcttgccgaagccacggccaaggtgaacgccgcatcgcgagaaatggatattctcaggacgtacggcgagcaacttctgaagagcgctccagagcgcggccaggagctgaccatcggtcggatcgacatgttggtcaacgtcaccggcgcgaattctccggaagaggctcgtgagatattcagcaagcagactgcagaccagctgactacggcaatccaggacgctcaaaacgattccgcaactaagatactctactgatgaaaaagagaattctgcgagtaacattcaacatgccttatggacccgaagtcatccgcgaagatctggatgttcgggtccggattatgaaggctgcgttgcggattcagaaccgggcgacgatggaaattttcggcctcaccactcagctgcgcgagtctcttctgtcgcagttcaccgcgtggaagcaccggcaacgtcaagtgggcagggaagatgaattgatgatcaaggtgtcggtggaagccggctactctgaccaggggcgcgagcaagtttccagagtctttgtcggcgaagttgccattgtcgatatcatttctccgccacctgacattggaatccgcatccagtgctataccaggcaaatcgacaggacgaagaccattcggaatatgccgcccgccaacacgacgtttgtcaagttcgtcgagtggggcgcgaacgaaatggggttgaacttcatctgcgataccagctacaatgatcaagttttgaagaatccgggccgttcgatcactgtcgcgtcggcaatcctggcgtcaattcaggatatgtacatgccggatgtggccgcgttcgtcgatgatgacgttttgatcgtgaaggatcgtgacaaagtcattcgtccggatgaagtcgccaacattaactcattcgtcggcatcccttcatggtcggaatggggtgtggaatttcaatgtctgtttgaaccgtcgattcgcgtggctggcggtgtcgcggtcgaatctctcatgaatccaagcgtcaacggcaactatgtaatcaccgctctagagtatgatttggccagtcgggatcggcctttctatatcaaagtcatggggagtccagcagcgtaatggccagggaaatcaaatcgttcaatatgttcggcgtgcactacaactcgcggcaattctctgcggtcgatggactcaggatgatgtcgggaatccatgatgttccgccggaagaattgctcaaagggaccgacgtgctggcccatacagaggaacaaccggaaggcgtttggcttcccttgatcgctgcgaacataaatctttatgtcattgaccgggcgaacgtaatcgctcccgtacaagtgcttgcgcttttgtctgaactggtcatagattggaactttggcttcctcaaagattggacaggggtcaaaattccagcccgatttgtcgaagatatcaagagtgtaaaaacagcccattcaccttctgtggtcgcaagtttggtggcgaatgggtcagcttctatgcgcgagctggaagaatattattcgactcaagatgcctttaagatgattgacatcatgacggcgaagagcgtgaatgaggctctagcgtccgaagcatcacagaacagaatcaaaaagggataattcctaagcgagcctgggaaggctatactagacctgccaaatcagaggctttcccatgtccaatattcctttaacatcagcaaaatctaccgacagaacgcgactgatcgccgctcttgacgctcggtcgcggcgggacgcgctcgactttgaagtcatgattcccgcccaggttgttcaatatgatcggaccgaaaatatcgctacaatccaacctctcatcacctgggttgatacggaacacaatgccgtccagaggcaccagctggttgatatcccggtgatttccatgggcgctggcggcttccacataagtttcccgatccagcagggggatatcggctggatttacgcggccgaccgcgacacctcccagttcttggagtcgctatcgatgtcgaagccgaacaccggccgcatccacaaatttgagcatggtatgttcataccggacgtattccgccgatataccatcaattctgaagactcggcagcgatggtcatccaatcgactagtggagcgacccggatttccattcgcggcgacaacatcaagatcactgcgccgtcgaatgtcaccgtagatactccgcaggcgaatttcactggaagtgtgactatcgccaacaccctggttgtaaacggcgtcaacgtgaacaaccacggccacctcgaaaacaatccgcctgatgcccggacgaaaggcggcatgattgcctaaggagaatttcatggctagttttgatttttctgatttaacagcgggggggggttgtaatggctaattatgactacatagtagatactggagtcatagtcgccgataccgctgacgttttgaaagacgttgaagcggaattcagagcggccctcggcgccaatatcaacctggcggcttcaacaccccagggaactctggtcgcggctgagaccattgcgcgttctagcgtgatgaggaatgaagctcgcattgccaacaccatcaacccaaacgtttccttcgggacgttcctggacgccatctgtgcgctgatgggaatcgagcgcggctctgatctttcgacgttcggctatggcgtccaagtgaccggccgcagccagacccgaatttccaccgggtcgcgtgtgcagactccggccggagcgattttcacggtcatgagtgacgttctgattccggcaaccggagtcgccaccatcgacgtaaaatcgcaggaatatggaaacatccctcttcccgtaggaaatctgatcatcatcgatggaaccatcggttgggccggagcgaaagtaatcgcttcaactcgcgtcgatcctggcagccgccaaatgaccgatgcagaattgaagaatgctcgcgtcaatcgtttggcgatccaaggtcgcaactcgactttggccattaaagcgtatgtcagcgccgtacccaatgttacctcggtcaacgttatcgaaaacaataccggcacggttcaagttgtcaacggcgtatcattcacccttccgtatgcggtctgggtctgcgtcgccggaaatccggataaacaggctgtcgcagatgctctgtgggcagcccacaacggcgggactccctgggactatggcgcggccaacaacggcgtcccggtggatgggcctactggcgttcctgttcgcgatccggcatccggtcgaaagtatgtcgtgaagtggactactccgatcatgtatgacggatatgtaaacgtcaccgttcagcaaggctcttcctcggtcgctccggaagcaatccagaacgcagtcgtgaattacgcccaggggaaagtggagggtgaagagggattggtcgtcggcgcgagtctgtctgcctttgaagtggctggggctatcgctcgcgagattcccggtatctacatcaaactatgccaggtggcttgcgtcccggctggatcgccggccccggctcccggcgacttctcgcctgaatacgtcatgagcgcattcggtcaggctaccatttcggttggtaacgttagggtgactttcgtatgactctgcctgcgtacaattctgatattcaacaggcgctgaagtggctccacaaccaggcccctgggatcaccggcttggttcagcgaaaggctcaatggtatgatcgtttcagccgtcagttttgggtgaactgggagcgcgacgttttcaacttgaagactgccaacccgttcggccttatggtgtggtgcatcatcctcggcacgccttcgaaaggcttcggcctgtatccaaaaaacagctcttgggcgttcggtcggctgcgccagaacttcgtttatagcgggaatcaggttccgccgcctgcagacgcatcgccgggcggcaacttctacggtggcggcaatgccgaaatcctcaacttggacgaaatcaggaaagtgcttcagctaagatatgtagcactgatttcgaacggctcgattgcatatatcaatcgcatgcttcgctacatattcaacgatgatgagccgtgggacgaggcgaccgggttgtacttctatctcatggactcaaccggcgagaatggacctgtggagaacttggccatatatcggaaagattgggaagggatggttttattgtctagctcgcccaggacgaaccatgtgctgatatcgacccctgccagtgacgctgattggcctggtgtcgatccggccgcgagcggccgtccggtaacggtcgaaacggcgtccgctacggccccggacggctccgctacggtgtgcaagcttactaagccggccgggagtaccgcctacgtctccgcgccgatagatgggccgctggggtccggtagcactgtaacgttttcgttcttcgcgaaggccggatccacccgtttcattgcaatccagtcggctgccgatttccccagtcgagccgatgccgttttcgacctggattccgggaacgtaatcagcgatcagatgctggacagcagcgtggtaagcgcccgaatgattcgtctggaaaatggctggtggcgctgcgttctcacgaccaaaaccgtcagctcttcgttccgcgctgcttacgtcgccccggcagaaaccaacttcagctggatcgattcgaattccagcacggcgattgacgtgcttatctggggcgctcagatcgaactgggtgatactccaaccggatacttggagactaccggggcgcccgtaaccatcaccgattatgttttgcagaacacccagaccggaacaatcaagttcacacagccccttccgactggagcagaagcgtattggactggagactggaaaggcgggtctgagaccgagccggccagattcgcagtaggggatgggactcaagatacattcaatctgtccagccctgcatacatcggcctacccactagtggggcgttcaagctagaatacagagttggtccggcgcttaatttgtcgccgcaattgatcaacctcatgaatgaccgggcggtcggtatcatgccgacttgcgccggttgcgatgtaaaagtcattcaggagtaatgacgtgatcacacccgaactgatacccagtccgtttgctgcgcagggcgacaaagacccgatcccgcagacttcttccactggcttcgctaaccttcgcgacggctacacgccggactacgaaatcagcctggcgtcgaacaacccgcaggccaaagcggtcgagcgaaagattcaaaaccaactcttcttcatcgcgacccagaacgcacaggcgtggcagcggcaaatggcgccgccgtggtttcagggcatgcctggcggctatgaacagaatgcagaagtcgtgcgcgtcggaaatgacggcataatgcggcgttatcgttccatggtgaatgccaatgcgagcgaccctctcagcagcacgacttgggaagagcaacccgcatggtcggtgatgcgctccaacatcccgatgccggccggaggctcaggcctatcttctggcggagaagtcatcacgaccggccgcaacttcaacgacctgttaaatgggacgtgggagttcttctctgattcagtggttgtcgcttctcagaatgcccccgtatatccggcttctgctggtgccgctgctggcatgttggaggcgaaatcttgggtgtccggggccaatacgttctgcgtccaacgctacactgatcgcgtcgggaacgtcgctgtgcgcgggcttaatgccggagcgtggaccaactggatgtatgcggtaaacgtcatggcccttcaacaaggtcgggtcacctatggagtcgcggccggatcggcgaacgcttacacgttgacgctagttccgcagctccaaggcggcctggtggacggcatgatccttcgggtcaagttcaacaccatgaacaccggcgcctccaccatcaacgtctccggactcggcgccaaggccatcgtcggcgcggccaacttccctctcaccggcggcgaacttggccaaggactcatcgctgagcttgtattcgacgcagcaggcgaccgctggagaatcctcgcaggcgcgccacgcatccaagttggcaacgccgatcaagattaccaggcccccagctggaaacaggtgaaggattacgtcgcgtcccaaaagctgactgaagtggactgggctgacgtcgtcaacaagccgaacgtcgctatccaagacaccacgccgtggttcgccaatctggagctgtccgatgctcggcctttcatcgatttccacttcaacagcaaccgcgccaaagacttcgactatcgctttatctctgaggctgatgggtcgatggcattctattctcgccaggggtctgccagtcctacccaggacatcctgttcagcaggtcgaatgtaacattcctccagccgcgactggatgttgcgaaaaacctcgcgtacatcgccaactctggtcccctttggcagaacaccactgccgatcagcctggttggaaattcaccttcgcacaaggtgtggacgccaacaacaacgcggttatcgcagtcaataccaccaacccggacggctcttatcgctcgcaggtcatgcgatgggactgggcgtccacgaacgtcatattcaacaaccgtccgctcttcgccggtcaatacaccccttgggattctgggaacttcaatccttccaccaagttgacggtgaatgccgtgaaccaaatcgccggcccaaccgggattcggaataccaacggcaacaccggcaacatgaacacctggggttccggctccacgacggcatcctatggcaatgctgccattcaaatcttcggaaaagggggcggtgagcctgccgcgatctatttcgacaactcccagaccggatggtatctgggcatggacaaggatggacagctcaagcgggccggctggtcgctcggcaacaactcttatgtcatcacagatgaattcaacatcagaaaccatatcaacacaatggctgcgcgcccgatttgggggaatgtcgagttctggggtccgtggaacttcgatccgaatcttaaactcactttgaacgctttcaatgatagctcattcaccaggatgaccaacagcggcgcgaaagacgttggtatcgcgtccatgacgagttatgctgatgcggccatgtcattcttcaactatgaagcctcgaatccgaccgggccgcgcgcggccgttatttcgttcgtgagaaatggatcgcgtggagtgctattcggcttggattctgacaacaagctgaagtggggcggatattccctaggggacgtcgcgttcgagattgccgactccaacaacctcatgagcctgtggtcatcccacgctgccgcgccgaactggaacgggcagaccatctggaggtcgggaaacttcaacccagacaccaaggcgactttggcagctcgcaatacgacgtcatcccctacaatattcagttatggggcgtccggaatcgcatcaaccggacaggtcggtgcgttggttgtggaaaacaacagcgtcaccaataccgcagccgccatcacgttccattcgccgcagaaatatcaggtcaacttcggcctggatgcggacaacgtggtaaagatcggtggcggcacaatgggcggcgtagcatatcccatcatccactccggcaactacaacaactacatcaaccaggcgctggttcaggtgggtcttggcggagtcggttcctatggaattttcgcggttctggataatgccgctccaaccgcaaccgttcaacccggagtggtcgtggacggttccattctcatctactcgtcttgcgccgcaaactacaatagcggtaaaagacctgccggaacttggcgctgcatgggatatgtagtcaaccgggatgccaacacccctgactccgcgacccttttccagcgagtgacgtaaaatgaaatggacgcggatcagaaacccacgttggctggacgcagtaaacatccacgccatggtgactttcgagggaatcggtgaagtgccgttcaccgccaatccgcaagacgtggaggcccacggaagggccatctacgctgcgattctatctggggagcacggacctatcgccccggtcgattcgaagcgggagaaggccttgcaggacgctatacgagccagggaaaagcgggctatccttcgggatacccgctggcccatagatcgccacgacgagcaaagacggctgggtatcgaaaccacggacggccctgggctgatcgcagcccttgttcactggaggcagcagattcgcgattggaatagcggggatcggccgcgacttcccatggctctgaaaacaatgttcaaaaatcaggagtattgatgaaaatcacgaagggtgttctgatcaccggaaccgggtgcaccacggatcgggcgatcaagtggctggatgatgtacaggcggccatggacaagttccacatcgagtcaccgcgagccatcgcggcctacctcgccaacatcggcgtcgagtccggcggactggtaagtctggtggagaatctcaactacagcgcccaagggttggccaacacctggccgcgccggtacgcagtagacccgcgagtccgcccgtatgtcccgaatgctctggcgaaccgcctggcccgtaacccggttgccatcgccaacaacgtgtacgcggatcgtatgggtaatggctgtgagcaggatggtgacggttggaagtatcgcgggcgcggcctgatccagctgaccgggaagtcgaactattcactgttcgccgaagactccggcatggacgttctggagaagccggagcttctggaaactccggccggcgcgtcgatgtcttcggcctggttcttctggcgcaatagctgcatccccatggcggagtcaaacaacttctccatggtcgttaaaaccatcaacggcgccgcgccgaacgatgcgaaccacggccagctccggatcaaccgctacctgaagaccatcgccgcgatcaatcaaggatcctgacattcgcccaaagaaaaggccgcttattcagcggcctttttgctttctggctttgcctcttcaaccatcttggcctcgaccggcgcggcggactcctcctgagttaccgaatccacatagttccctagtgaactcagaacgccgattaacagcgctcttactaccttgtccttgactgtctcgcctatgatcttggtcagaacggatattaactcttcccggagtctggggctgattcttggccgaaagcgcttgcgatgctctttgcgtttcatgtttagtcctctgtctgcggtcttctcctcaccccgataatggcttggggatgcgttgtgttaatcggaagggtcgggcgctattataacccgtcgaaaatgctcgcgcttaactgtttaacgatacgcaccgcgatactaaatcgccttctttctggccaaggaactctggcggcctggtccggtctaaggcctaatttgtcgacattaaaacgagaaaacccggatcgcctgtaggacaaggcgtccgggtttatttcgatctagtgtacgctagaatcagtggcttccgccccaaccgtccagccagcaatcgaagacggcgtgtctcggcttgtccttggcgccatgggagaagtgcttgaaccggatgacctggcccttgagatgctccctgtcattccagcggcgctgtttctcatcgtgggtcaggctggaggccgacacgttgaaggtgactccaggccacagacgttcgttgcggcagacgaacgcaccgaccattccggacggcgacaggttttctgcgtggctggagcgggccgtgtggccaagttcattgatgaaagcttcattgttgttgtgcatcaactcttccacgtcgatgatctcagcttcatcgtagtcgtatcgcttgactttcacacagtgcccttccttggcagtcgagcgaccgaacttgtacagtccatcagcgcgcttgcccatggaaccttcgaatcccagcattgtgtggcggcgctcgacttcgctgaactgttcgatggaagtcaccagttcctgctcgaccaggtgaatcctctcatagccgaggcagtgacgaaggaagttcacgcgctcggccgccctggctaggcgatcttcggtcggtgcgcgaggatcggtgaaatcatcgaacacatggaaagaccagtccggctcaccgctgtggcggcgaagatcgccggacgacttctggaaaactttcgggtcgctgatgtcgccgcagaccagctcgccgtccaggccgttgaacagtttatcgctgaggtattcgtagatcgattgattgttctgccgcttgagttgacgagtcagcgcctcgccttcgaatacgaagcagcgaaatccatcgatcttcggcgagaaatacatcggcagttggccttccagcagcttcgggtcaaaattcgatgcgagcatgggtttcatacagttctccagaaaagaagcccggcgaaccgggctaaatggcggtaagccggctcagatggtttcgttggcgtggttcagttcggccatgatcgacgcatagagctcatccgactccttgatgaacacgccgtcgtacatgacgcctttgcgatccttgatggtgtcgtaggcagcagcgtagcaggcgagcatggtggtgtcatgctcttccgtcacgtcgaacagagtcatggcggccgataccaggctcttgatggccaacccatgatttccacgtgccagagcgcctgccagatcgccgaggcgctgcaaatcgtcgccgtaggtgggatgtacttcgccgctctcgatgaaggccgacagatgatcgaacagattttcgccgagttgcgcggccatgatcgtggcaaccaccattacgtcgccgatgccatctttcacatcgaccgggttgttctgaacccaggcttcgcatacttctgcgaactcttcgaccaacttcaggaattgatctttcgcagacgagcctttgatcaggttacggtcggaagcccatttaaccaccaggtcgtgaagttcgcggctcatgatttgttcgatgttcattctttcgattccttttggatttgggatttgactgcgttgattatggacgccgtgctctggcgcgatccatccttggtggtgccgaagtagaaggccattaccgacttcagctcggcgaaccaatagccgatgatggtgccgatggcgaccgaggatgtcgggtccatcagagcctcgcggccgaatgtgaagattgcgatgatgatgagaatggagcctgtcagaagagcgaatgtgatcgccgggcgaacgaaatcgttctgctgcgccgcaagcctcctcgcagaatccctgtcggccgcctctgcggcgaactggctaagctcggcctggagctggttctgctcagactgaaggcgattttgttcggcttgaatcgcaagctcctggagacgaacgcgctcggcgctctggagttcggcgagacgcgctagagcttccggattcgcgtctagagcgctagcgaccgaggctgggtcggccttcgaccccagcgccgtcgcgacgatagcgccaacggcggcgcctgcaggcccacccaggagcgaccccagagccggggcagccgcgccgatcttactacctatgtctttccagtccatttcgactcctcaaaagaaaggcgccattacagcgcctttctccggccggtgatttagaactcttcggcttcggtcgcatcgccgacgccaccggcgtcactgcgaggctgttcctgcttgctgtagtccaccttcacctcgccgccgacgaacgacttgtacaggtcggccgcagccttgaagtgatccgggttcttcaccaggccttccagctcgaactggacgccggaccagctgcccttgtcgttcgacatgcctacggtggtcatacggaccaggttggcgaaagtcggcggggtgcgcaggccctgcggggtctgaacctttttctgggacagcgcggtcatgagcttcttcgaggccttgatctgcgaagacgacagggagatcagagcctggccgaaatcgccggtgtccggatcgatgacgatgacgtaatgaccacgggtgtcggcgaagtagtcagacttcttgtcgctgaccgaaccgtcttcgttcggcgcgtacaggcgtccttcgacttccttcaccttggtcgggtctttcatcatttccttgaagtcttcgacgctgatggcacccttgaaaccgccctcggcctcgcgaccggcccagcggatgaactcgcggcggtacgcggccggaatgatcagcaggccggtcttgccgtcgtaaaccttgccggtgacggtgttcaggaacatgccggccttcgcgccttcgatgtacttcgggtcatcttcatcgacctggggagacatcttctgcaaaacctggatgaaggggatggcataggactcggcatcggcgccttcgaagcctgcgccgtcatacgatcccaaatccatgaagtcgggaacttcggtagtcgcgacggcgccgccaccggtggcaactgctacggccttggtttcttcggttgcttcggaagtttcggttttcttaccagccatgttaggctccttgtttgtcgaatttcagttatcgctaactgtgggtttataataacggaagttgcaactaagtaaagcaaattacatattaagatttgctctttttcaccttcggtttcgtgatcttggcctctttgtattcgtgtacgccgatgaaatctggcagctcttcgcccttctccaggtactcgcgaccgaacgcctggagggtctggtaatggacatcgcggttgatggtggcgtcatagccggcttcgatgatggcctcggccgccttcttcgcatcttccatttcgccgcgaccgaattcggccagaaccttggtcttgatgatgccgtcgttgtcggtgtcttccagccacttccagaacttcgatttgttctcttccttgacggaaatgatggccttcggctctacttttaccgtgcgaccgtccgccagagtagtggtcttctgaccaagctcctccaacagctccggaatggtgttacgcttgagggtcttcagctcctcttccttttcggccagcgccttttgaagatcgaggatttcgccgtccagctgcgaagccttgtccaccaagttcagcagtcgatggccgatgtcggtggcttcaaccgccatttcatccatgacgccaaaatagtcgatttcgcccggcgcgttctctttcaagtattccgggatttcaagctcttgctctttcatgtccgcctccaacttagtgatgttcccttacttgaaccaagtattgagtagatattatgccgcatcttccttgatacggctactgatttacatattaaatttcgtcgcgagtgctaacgtcagcctcaaacacgccatcaacgacataacttgccaggttgcgtttccactccaagctgacctggattttctcgtcgatggaatccagacagatcaggtcgaagtacagaaccgagttgacggtgccgattcgatgatttcggtcttcggactgcatccgcagctcgttgtcttcgtcggtcgtgtagtagatggccacgtctgcggctgtgagtgtgatcccgatccctgctgcggccgggttgcccaggaacacctggacgcgcttggcctggaaatcgtcgatcaatttttcccgctcggcctctttggtctcgccgtagtaggtgccaaacgaaatcccttgggcctccaaatacgccttgatctggtcgatttcctgaatgcgcatggcccagacgatgatggaacgctccgggtcttcctccagcagaccctccagaagatcagtaaacacggcgaatcgcgggttgtcttcgggcggcaggatcaccggctcaccatagacgttgatatagccggacgccacttgcttgagcttcgagcgcgctgccgcagcatcgaaagatacatcaagcatgaaatcttcgttctggagaacaaagtggtagtcttcttccacgcgctggtaaacctttcgttgctcaggcgacatttcgaagtatatgcgcttgtacactttgtccggcaggaatgggagtgcttctttcttcgttacacggaaactgtgcggctcgatcagggaccgcagcttgtccaggttccggaataccgggcgcccacactcgtctttttcgaccagttgcggcggcatggtttgcttcccttccagcttgcgcatgatagcgatcattcgaggatcgtcactgggcaccaagacggaaaattcggccacaaacgcccgataggatttagtccccagaattccattccgcaagaattggaactgcatgaacaaatcggtcggtgcccgcgtcagaggagttccggaaaggatgcgacgggccacggccttctcgcccagctttacgatctttttcgcacgcttggcttgtgggtttttgatcctcgttgactcgtccacaattgcgcaaactttgaatgtatcaaggaatcgctcgacctcatcatagccagcctggtggttgattgcgtcaacgttgatggcgaagacgcgaagaactttttcatctgcgaacgtctcggaatacagacggtccaagcgcgccctggcctttttggaagtcggtcggccgcgccaatccacgctcaaagtcttgatcgcgacgtgggtgggaatctcgcgcagaatccagttggtgtggacgcctttgggggcgacgatgagcagcgcgtccacgcgcccctgtaggaagaggcgaacggcatcggccaaagtcgtccaagtcttcccggtgccctgctccatcaggtatgcgaagttccgtttgttcagggacgctgccagggcattgaattggtgctgcatggcctcggtcttcatgcccttgacgggatatgttttggctttcatttgttctccaaatcggcgaggaactgaacaatgttatccagtccttctgcatagctcgcaacttccaccaagtcgcggctgttaagctcgaacaaatcgagcataggattcagcagcagccaatcggttccgatcttggccaggacgaagccccggccaccccagccgatccgctcccgaagaaaagggatttgcccaggttcgaaacatctggccattgggcaggtggaagcgcgtttcggccactcctccaaagccttgaactcgacccagaactggacacctcgacgattcaggcagatcgaatcggacatgccagaccgccgcgtctccagaaagtcgatcaggattcggccgagcgagcgctgcttaaacgcattcgccgctttcgtttcgcgatcattcatcaccttcgccctctttggaaactttctctgcttgcgctgccagctttgctttttcgcgttcggtcaaaatccgcttgacggccttcacgatgaacatatcgattccgctgagcttccagcctttgatgaggaaccaagaacctgtcggcgtcccttcagcaatctgctttccgtattgcagatatttttcaggccgaattctgaaacgtatcggctgatcaaccgagtcatcaacgcacatgatgtcgagaaactgcgactggcccttgtacaccgggtttttcccttgatcggccctcttcttctggcgaatcggttcgttctcatcagacagaacttttttcaccatcttgacaatgaccagaccatcatctccatcgcggatatcccgaatgttccgaatggggtttccggaagttactccaaccagctccggattgtcataagcatgaccccagagcgtgtgagcttcgttcaaatctgcgaattgaacttcagaattcgacagactcgcggcgactttctcccaatcctgaagcgtcttcaggtgggtgcctgccagctctttatattgagccttcagccccttaagatcggccttcaactccttcagatcggccttcaacagtttctccagttctttgtcttggctgattttcgccgaaagaatctgggcttccagagctgctacatcagcagccttgtcctcaacatcctgtgccgatatcgggcaattggccagggcgatcctcgcggccttgacgtcatcacgaaggcgcaggaacttctctgccttcgccgggccaaagcctttggcgttcatgatgccgccgatcaagcgtccatccgccactacccagttaagttcggaatgctccgggtccagggccgtatattctacgccttccttggccaattcgcgaaggatggacacagtttgctggtcgtctttcgccgcccgaagacacgcggccgcgtattccaggcgatgatatcgcttcatgtagcaggtccagtacgtcaccacagcgtagctgaccgagtgggagcggttgaatccccaggcgccgaaagtcaccatttcctgccacacacggtgagcatcgtctggggcgacgcctatggtcttggcaccctcgatgaacaattcccggcgcttgttgaagaactcttcaccctttcgcgcagacatggctttcctgattgccgatgtctgctcccagtcgaactggccgatgtccttgacgatggacatgatctgttcctgatataggaaaacgccgtatgtccctgacagatattgctcgacctgcggaatggtataggtcacaggctcgcggccggccacgcgctcgatatacttggttgccataccagaagacaacggacccggacgggcgagcgccgtgatgtggtcgatgttctcgaacgcggtgatgttgatcgcgtttgctaccgagcgaacggcctgcccttcgaactggaagatgccggacattttgtcttcattgagaacgtccagaaccgccttgtcgttcaaaggcaagtcgtacaactcttgcgcggtcacgcagttcgcgtcctggatgactcccaaagttcgaagtccaagcgcgtcaattttgaggagattcagatattccgaatcgggcttgtcgagctgcgcaacgccttcggaagtcaccgtacagaagtcgatgacttcatcgttgcagaccaggatgcctgccgcgtggacgccagagtgggatgggtgaatttcgaggtcgcccatgcaggcggacgcgatctcatacttttcacggaagtcgcggccgggctgagttttttcgaaagtgtcctccaatccttttccatatcgttcgtccgctgatgtatattcgatgatcgagtttttgatgttgtcggtatcgtggaaggggatgccgaagcgctttccgacgtgagcgataaccgacgcggccttgagtgtgttgatgttacccaacttcacaacgttccaagtgccatacttctgctggagatattcgaacactagatagcgatgggtatcggcgaagtcgatatctatatcgggaagatcggaacgggaaatgtcgataaagcgctggaagagaaggcgatgcgggagcgggtcaacctcggtaatgcccaggaggtagcagaccaaagagccggctgaagagccgcgagccgggccgaccagcatatgcttcttggcgaacgcaaccagatcggcgaccaccagaaagtagctgtcgaagtctttcagctgaatctgcttgatctcttcttggaatcgatcctcatactcctgggtccattccttgatgtggccgcgactgaggcggtaggcttgcccctcgcgagccagagcgacgatatcaccatccaagtggatcatcggcgccttcgccagtttcacatccgccaactgctcgactaccgcacgagtattggcggcggcggcatcgaactcttcgcgagtcatgatgtggcgtaaacggctccacaactcctcttcggtggcgatgtggcgaaggccgaccgattcccgcaccttccaggccgacgcgaaatcagcatggtcgatggacggcatgtcgttgtaagaggtaatcaccaccggctttccgaatgctctggacgtctccatagcaccgtgcgcggcgaccatcgacgcgggattgatgtcaatgtagtcgattccggccagatccagatgggcataggcctcgccagcgaatttgatgacgccgtcagcttcctggaattcttgcggagtcaatccttgattctggaccgacttggaagtcaagcggtagaacttcttggtgtccttggcgagcacccaggctttgagcttcagctctttctcgccatcgtcggcgcatttgatcgggatttccatgccgaatccgcgaggcagttctgccttggcagcggcttgttcccaacggacgtggccccatgttccatcatcgacgatggcgacgaatggggattcgatctctttggcgcgctcgatgatctccgggaatcgaccatatgcggcgccgtaggagtaaccagagcgaacgcggagctgagggaaagacatcatgcggcctccattgcttgatatgcccgatatacgcccatgcgcttgcaaacttcgtggagcagccgcacgtcgtcgagcgcccggtgtttctgtacatatgggccgcagtagtgctcataaagatgctgcagccgcatgcggtggccgaacaacggcgccgactcttccacagtacagatatcgagcgatgggaaattgacttcgtccaggccgagcttgccgcgagccagatcgcaggtaagcatgaacttatcgaatggaaggttgtgagcaatattcgcgtcggctctggaaaagaagtcgcgaactttctgacgctgatcgaggaaagatgggtgcttgatcagatcttcgttcttcaaccctgtgatcttggtgatgatttcctcgataacgattccaggattgcagatgaactctacttcatccaaaatcttttcaccatcagttatcacgccggcgaattcgatgatcctcggctgcttcctcaaactcaccctctggtggaacgggagtcctgtggtctcagtatcccacacggcgaatatcatgtttgttccctcttatgtcgaaagggccggctgctttcgcgaccggcctgaggagtataccgcgacggctgaagatttacgccttctgtccgtctttcggcgtgatacggccggagcgcatggtggcgtggacaaacgccgaatagttgatcgagtccaaggccgaatcggcatccttgaacccgctattcgccaggcgagtgagtttgcccaccatgtgcatcacgaacagggcgagtcgatggtcatcggcggttttcgccaccaggccgttcgggaagaggatttccatgatctttccgtacatcagatcattgcgaccataggtgctctggcggtcgcggaagacttctgctgcggcgtacagattgttgagaacatcttccgcgaaatcatctggatgggaatcatcttcgcccggccagacggattccatggcgaacggcgcggcgtcttcggtcgggtcttcggactgagccgtttcagcgagcggagacggggctttcgcaaacgcctcgtcgagggtaggggcggagttcggggctgccgggaacggctcgtcgagggtaggggcggagttcggggcggccgggaacggctcgtcgagggtaggggcggagttcggggcggccgggaacggctcgcctgccatgtcgttgggcgcgctatcggggtcgctatcggccgcgacggcgaagaacggcgcatcgcaaccttccaggttcaggatgtaggagtcgatccccaggctattgtaggcatcgatgatgtcctggcgatcatcgaacgccgcgacgatcttggtgacgccttcgattttcttcagtatgtcgagcgcgactgcccgcttgaactgaggcgccggctcggtgttaccatacggccgcatgatgagttcatactcgcgatgttcggcgatgccgagttcgcggtggagcttggccctggtctggaaaaagtggttgtcggttcggccggtgacgaagaaaatcatgaggtcggcgtcgatggcattcctgatgcgacctacagcgtgcgggttgagagtgtccttgtcgagacgagaatgatactcgtcccattgccgttccaaggcgaagctcttgcggtggctatcgtcgaatacgcagccgtccaggtcgaagatgatgatgccattctttggtttgcgttccatattcagatttccttactggttgctttctgggtgacggttttatcgatgaacgtcccatcagaagtgaggcggaaaacttcgccattctggatgaaatcgaacgattgcacgttcatcgtgatgcgaatggattcgctgccgttggtcacttcgacttgtgcgatgtcgccaactttctcgacaatgatcttcatgttacatggacttcccattgacggccacagggttggcctcttgtttttccgatccccagaaatcgcggcgcagttcttcctgctcggccgagcgatccatccaggggcgatagaacttgcactggtagataggttccaacggaacatcaatcacaggaatctgacctggctttgtctccagagcggccatgaaccggtcataggatttctgctggatttcctcttcattcatcaccttcgacccatagcgcgggaaggcgcaggagccggtggcgacgcagtgcggctggagcaggctgtcgaacataggatagacttccagaaccagccggcgcatttcgcggaatacttcctgatattcaccctgggtccgaacgcacaggcgaaccttcgccatgtcgctgagagtccgcagattgaacttggccgcgatcttcgtttccatgttggaagggatgatggcacgagcgtcctggagcgacgcgccggcctccagaagcttctggtagctggtttgcgcgtcggcaatggcgtcatgccacagacggttcagctcttcgcggacatggtaggtcgggtcaggctcgccatttaccgtagccggttcgtcgaattcccagcggaaggcttccggctgaacgacggcgctgatttccagagcgcgactggtttcctgctggtaagccccggtacgggtccgaacgagttgatgggtgaagttcttgctgacaccctcgatctggaaaatgaagtccacgaactcgaacggcgagcggatggtgtccagcatgtacttccagtggtcaagcttttcggcctcggtcatggtcgccgggtcttggccgcgcatgcgagtggatttcgtccccaggagaagttcccaggcgttctgggtgtaactgatcagagaaattttcatcagaaatcttccggaattggcgtgaagtggaattttttggttagagccagggccaggccttgggcttgctctttacgaaggccatactgctctatctcttccttgagcagttcgcaggcctccagacgcgactcatactcttcagcctcctgaacggatgagaaaacggttccatcagaggttctgtacacaagttcaatcgacatgatgacctcagtagcagcggatgatttcggcgcggatatctcgacggtcgaggtagtgctcacgaatcttatcgcgggcgcgctcggcctcttctcgactgccgaacgacaggttgaacgaagtgaaaggcttatcgtccaggcgcccatcgccaatcaggtacaggatgcctaccagcacgaaagacggcgctgtctgtcgcgtttgcggcgggtcgatttgcatttcgaggaaagacatgggaacctcttcaggatgatctggtgcgtacattaatagcgctcctgctgagcagctacggtttccggctcatagatgagcatgtcaacgatttccgggcactggcctttcacccagtcgatggccgcgaccagtgtggtggaagcggagaaagagaaagtgcggtaagactcatggatgtacggcgaccccatcgaatcgcgctcggtcgtgcgagaaatgactgctttgatattaacgatccggcccatcttcggcctccactttagcgattatatctgacaggctcagcttctcgccattcaggaaataactggcgcgaaacttcctgtcaccctctggcccgacgatccgggccgttatggtgagactcccgccgccaagggcatcggtgtccctgaagaaagccagcagcgcccgcttgagcgctgcctcgcgaggatcgacggccattaacctaccacgttccagccgtgctgagcgcaccaaaccgcaccggcccctgcaggaaggctattcagaaggaacacaggagtcaggcgaccgtcctcggtcatatgtatgaagtagcgggcgccttcaccgagccattcggccttggcgatagcgcgttcgagattggccttggtggcgtaggttttggtgtggttcttgtcggtggagaaggttacttcgcgggccatttgtcgattccttttggctgaagggtttcgcgtttcgatgagggaatattacgcccacctgatccagaagtaaagcacttttgtaaattacttcacgaacatctgcttggccttctgataagacgaagaagtcatcaggcgctcgatgacgtccatgtccgaaaccagatcatccagaaggacattgcgccaggtagcgaaccggccgagcgagaagatgccagcctcatgggtgagattccagatcatggattcgcgctcgtcgcggccgagaggaacgattttgcctttggtctggatggtcggctcgccgtcctcgattagctgtttccttctgatcccgaaggccgcgcagacttcatccaggtcccatgccggattccattcgatggtttcgatctcaccatcagcattctccaaaacgccattcgcgacggattccacgatcagagtatcgccggtgatggacgcgcgaaatgtcccgaagtcgggactggggaaataaacggtctggaagacgtcacaagggatggaaagcttgtatcgactcacgatgatggatgtgcctttaccgaatgacgggtcgatacccaggtccatccccgccgcagccaggttggcgcggaacggcgcggtgcttatgacattcacatggtcatcttgccggcgaaggtactggaagaaagaggcgtcgaaaggacgactccaagtgatgcggttcgccagcttggcgacaagctgctcatagaagtcggccggtgcgatccaacgcttttcagtcgccagattccagatggaccggtccgacaggccgcccgttactttcctggagtacatgttgcagtggtcgatgcgcggctgggaaatgaattcgccgtcgatgtagatagctttgtgtacagtgacttcgcggaacgggataccggtgagttggccaattactggcgagcggaatcgcaagagtgcgttgtgacgctccttgttctccggcgtcgccgcgtcgatgatttgggcttgagggaaacgatgcgcggcgatcaggccggcgagtccagcacctacgatgatgactttctgatcaggaatcatgatgtgttccttctgagtgtacaaaacttgagaggataaaaaagggacccattttcatgagtcccttgaagagctagacgattcagtctcagaagagcggcggcttactcttcttcaccatcggaaccgtcggcgccctgatcttcaccgtcgtgctcctggccttcatcaccggccttctcgtcatcgccctggccagcttcgtcttccttcgaagcgatggcaaccagatcgacccagcccatgacttccagcttgctcagatagctgcgaaccgaggctccatacagcaggtgtgccactttctcgccaaaagcttcgatttctaccggctcaccgacggcgcagttctcgttgatgtaggcaaacaccttgccgcgaatcgaaatggcctgcggggtgccatggccgtcgccggtcgggatgaagtgggtggcgcgagggcgacgcgagccgttggacttcagttcctcgcgacgggcttcggccttcgcacggcgctcttcctgctcttccttgcggcgctgcttctcggcttcgcgctcggccttcttctgctcggccaggcgcttgcgctcttcttcacgagcgactttctgggcttcctgcgcggccttcttctcttcggccttcttggcgcgctcggcttccttctcggccttcttctgctcgcgctcggcttccttcgccttcgccttctcggcctgctcagcttccttcgccttggccttttcagcgcgctcggcttccttggcggcggccttttccttcgccttctcggcgcgctcggcttctttcttctcgcgctcggctttgcgcttctcttcgcgctcggctttcttctgctcggcttccttggccttggcttcggccttctcggcgcgctcgcgctctttacgttggcgctcagcggccttctcggccttgcgcagggcagcggcttgttccttggtcagctcttcgccttgggtctgttcgttctggtccatgttcttactccgggaatgtttgaaaggatggcttattggcctgtgagaggattatctctaaactaattgaagaagggaatacctttcgcctgaacttctctaaatatttttctttcgggaaagtccagactccagggaacttatttatgttagcgaagtttttaactcttacgcaaaaacaacaagtattcgattgcgcgagttatcccagtatacatcaactgactataagggatggacggcaagttttcttctaacatggcaacccgtttccattctgaaccctgcgacttgtggaacgtcatcgcccagccgaagtcgaatccgccaatagccttctgcgcctccagccgcacgtcttcctcgaccgaaaagctcagagggttgaacttcacccatcgttcatagttcgtgccgataatgcgaactttggcgaacaacatttcatcaggctcgtcgtcatcttcttgcccttcaggaactggcttgaagtccagcagaatggcttgttcgccgttcatgattccatattcgtgctggttcccagtgcacaccagcttctcaccgattcctggctgcacgcctttgtagccgaggattcggcgagcgcgtgcgttcaagcgacggcgagtattgttgtaagcgcaaagaatcacaccatcgttgtccaggaacgtccgcatttcatcatccgacatatcgaagccggcccggaccactatgtcatcatactcgcggcagggcaggcgctttccctggcggacgaacatcgacgcccgaacgatattgccggcgttgcgctcgatttcggtcatgatggtatcacaactgttctcgtggaagatctggacgccgcgcacaggaggcacctggccaaagtcgccgatttccaggaccggaattcggtgcgacaggaggcgctcttcatcccactcgccgatcatggacgactcgtcgagcacgaccaacttcggcttctcgtcgagcgagtctttgttggcaaacatgatttcgccgtcttcatcttcgccaatcggccgatagatgaagctgtggagggtccgggcattggtgcagcccttctcgcgaagccgcgctgctgctttcccggttggcgcgacgaagaccgtccagtccatcgagcagcaaagttcggcgatgatcttcgcgatggaagtcttaccagttccggcgaaaccagcgagtcgatagacctggcggcggtgcgctcgatcacaccaaccgcgataccagtccacaacggaattgatcgcgtcgatctgctgactgtttggtcgaaagccgaatcgctcttcgatctgatcgacggtgaagttagatgctgacatatttgcgttctccaacgctaggtttaattgaatcgaggctcagtttaagcacgccgtccacagaccagccagtatcacgacgatacttgcggccttgcgggtcgacatagaagttcttcgtgcgccgcagcagaacataatgccaagcagctccaagcgcgtggacccttcctttatacgggaaagccttcgcctgctctgcggcctctttggccccagggagccagcggacggtagaaaggaccaggaccgcacccttaatagcctgggaagcggcgcggccgtcctgtgggctatagcgatgtctatcgaagtctacccagtggtggttgccgcgccggagcttgaccgttcgggatcgcccctcgaacaccacagtgccttcgtgagttaaaatatgttccgccatcgaatgttcctttataacgtacagttatgctttacctctgcgcaggaagagtatactatcagctgactcgccaaagcgagcgaatttaatccaactttacttcggcaggaaagtggccgatactagagccgccgcctgtactgccctccaaaacagaggatacattaaatgcaagaatgcaagatttcccgcgaccaactcccggtcggtaatccgaatcccaatgtcgacaagacccgcgacccgaaccttaagcccggtttcctgcgtcgcagccgcgagctggacccggcgctggccgttcgcatccgtcgcgagctgatccacgccgaagcatccgacttggccaaggccggatgggtcaattcacagtccagcctttatggatcgaaagccttcccgcgccattccgtcgttcgcgtgaccggagttccggaagatggagctttcatcggcatgctgatcggcttcatcgagcatcgcgagcatggcgaatgggcggtcatggaagccggaacgaaagaaggcggcgccgtcattattccagtcgatcacatcatgcgagcgtcattcgccgaagccgaagagttcgccgaaaagtgggagcggaacttggggtggcgtctcctgcgccaactccgcgagtgcggcgccctggccgggactgaagacgagttcctgcggcggatcatcaatcgatacgttcgtgatcgcacgatcctcgatcaccacaaagtcggcgcggacaaaacctatactgatgcagtactcaaaagcatcggcgaaacatggccgaagattccttcggggaaattcgtcggacaccgagtcgcgcagctcctgatcggccacaagctaggtcgagcggggaccatcctgaatgacctggtggacttcctggagaagttcgcggccgggcgcgataaaattctcaacatcgccatctgtaattgaggtgaatgaaatggttgacttggaaaagctgagtccaaagctgagtcctcggcagcatgccgttctactggagatgtacaggcatcctgagcatccagttcacagatcgccaacgaatttaactcttaaggctttgagacgaagggggcttgtcgagctatcctggaaggattccgtggctggatatatgttcggtcgccaaccttgctggaaaataactgatgccggcataaggcgaatcctgggagtgctggggaataatatggaaaaagaacaaagcgaagatcgcccaagcatccctgagtttgagaagaccgacgccaacaaactctatgatgctctggagacgatttcgctgctggagaagaagttggacgaatccgaaaagcgcgggagcgagctggccgcgagctattgtgacggcgtagtcggcgatgaatacggccatccttattgtcgttataaagtggaacgcgacgccgccttggccgaagtagagcgcctgcgagaatcaaaaggcgatccctctggcagcttcgacaggtgtatgaagatgatgtacgagcgcgacgagaatgcaaaacgactcgacgccgccttggccagggtcgcggagctggaagggaagttgacggactgggtgcacgaagggttccggctcaacgaggcgctagcggtcgccaaggctcaacccagcgtgccggaaatatctggcatcggtcgcgatgccgaacatcccagagctgtagtgctgtatctgcgtaacgaacccagcgatgaagatatgcgagcaattcagaactttttgcgcgccatggccgcccccgctcagcacagcgtgccgaaagcatggctcgacgttcaggcagagcgccgccggcaggtcgaggcccaggcgctaaggcaggaagtcgcagcactgcgcgcaagggcggatgttgtgccggaggtgttcgggcttgagcggtaccgcgtagaaaaaactgggaagggtttctggccatactgcgtgcgtgcgggggatggaacgcgtgaactgttcgtcggccacttgaagcagtgtcagcgggtagcgaccgaattggctacggcgtttgaagatgggaagtttatcgccgcgcccggcagctcggctcagcacagcgtgccggaggggtggaagctcgtaccgatggacccgacatcgcagatgacctatgtcggtcagtccctgcgttatgacgcggtaaacagcatcggcgagatttaccggcaaatgctcgccgtagctccctcacccatcgatccggccgcgcatcctcagccgtgccagcaaccacaggcccatcctgcccgctgcgggtgcgagcggtaagtgccaagtaaggaattcatgtaatggaacagaagaaaccttcaccagtagatggagtcatcatgaccagcctcgacgttctccggaaagcacagcccgaagcccaggacgagtatgccgtgtccatgttcgcaacggcgatccgccagaaaatgcagcgctcccgcgataaaggccgaggcggctggatcgactgcgacgaagatattctgatcaacggattcgccgaacatgcgctgaagggaaatgagaacaacctcttggacctggcgacgttcctgatgttcatgtgggtgcgcggcatcgacgatgcgaagattcccccggcgctcgaaaaggcgcgacagcacaagatcatggaagcctggagtcgaatccatgaagatggcctaaactccgccagaaaggcgagtgctgcgcgacaattcgtggaagtgcctcgacgcaaggggcgcccggagcgacttgcatgaagcctcacgaaataagactggcacaggccgaagagttcctgcgcgaactcggccgagggattccagacgacgaacgggtgatggtcggctacgctgaagaggccacagtccaaaccgacgagaacggccgcaagctcaacgccggctggtggcctgtgccctggaaggaagggaaatacataaactcccgatccaacgcctacgcttgcatctcgtcatccatcaagacgcccaacccgaagaccggccagatgcgatactggcgcggcgaagcctctttcggccacggcctggcgttgatggtcgatgacatcggctcaggcaaagggtccaagggcgacttcgaccgcgacgagttccgcgagcgactagagccgaccgcgattgtagagacttcgccgaacaactaccagttctggtatttcttcaaagagccgatgtcacacatgctccagttcaaggcgctgctctattcgttcgtggaccaggtgctaaagaaaggcggcgacaacaccgtcaaggacgtcagccgttacggccggatgccattcggcttcaacaacaagcgcgggaaagacggcaagttcaaatatgccgacgaaaacggcaaacccgaactcgtgcgcctgtacagcgccgactattccaagcgctactcgccagaggaaatcgcgcaggccttcggcgtccgcatcattatgccacagatgaagaaggtggagataaaccgcgacgattgggtgtatgaccaagtatggctgaagtatgccgagcacatctgcacgaaatacaagatgggagaagcggcaggcggccaggtccagcagaatatgtccggcaaataccgcatccgctgtccctggggcgacgagcacaccaacggcgatcctttcggcgcatactttcgcggaccgatacctggcgccgagcacgaatatgtgttcggatgcgggcacgatacttgccgcaaagagcatcgacggacatgggcggccttcactgatgaagtcgtcctgccgtatattgtcgaacaacttgaacgcatcaaccgccgtcacatcggcgaggagtagtaactatgcaaaatgatcctggaattctgattaccgccatcggctcattgcttctcggccttctcgtcttcttcgaaggcctgaatggatggaaaataccagcgtcaaactttctcgcgtcgctcctgtgcttcttcgtcggcctttctgctttaacctgctggttcgtcttggcgtttgacgtgttttagtcgacgaacggtccggaaatttcggatagggacggaacttattagctctgccggtttaggtaggagataatagccgtccctttcgcctcaatatgtagaggcggtgttatatccgatcatgtaaagcagaaggcggcaaacctaacatgattatcgacgacgacaacattcttggtgatgataatattcttggtgatgacgaatcggggtccagtgagttcgatctcacacagatagaagatgctggaatggaccctttgatgaccgccgcaagtaaggcggccgatgatgcgattgcgaggaacgaggcgcaccgcgcgcaaaaggcggcaagatacgccgaggcgtatgctgaaccagacttgaggaagcgagcgcggttgttgatgctcgaccaggcctttgatcttccggtcagccggctggtgaaaggaccgttcgatgactttatcaccaagtacagctcgacttcagacagcaactacctcgcggtctatgatacgttgttctgtaagggcgacggaaccgtcccccacccgcacttcgacgagtttcgcggccggctggttgaccaccgaggcgtggcgttcaataacaagaccctcgaccccattgacctgatgggcgccctcgcggctgcggccttggacgatccatcgatcaagaagacgattgaaacttgctgcgtgtgggcgcgtcgatatcgccgcaactctttgatcgaaacgtttgagaagaagataccggagtgggatggtgaagagcggatcgacacgctgctgatcgacttgttcaaaccgttcgacaccgagcttaaccggatggtgagtaagtatttctggctgagcttgtactgccgcatcaactaccctggaatctcagcgccgatttcgctggcgttgattggtgggcaggatgctgggaagacttacttttcaatcttgatctgtaaagagttgtcgagcgaccgaaagttatcgccggtccagcttgacctgagccgtcatgaccagacgccatttttgcgcaatatcactggcaactcggtgatcgcgaacgtcggcgaaatgtccggcttcaaaaagggcgacatggaacgcattaaagagttcctggtgcgatccgatgatactttcgatcagaagtttgaaccaggcgaaactatcagtcgacaatggatcaccatcatggacggcaacggctatgatggtcttcaacgggatgagtcaggaaaccgtcgattttatccaatgttcgtggcgcaacttcccgacgaggatggcaagccgaattgggttaaaccgggcgatggaaatgaaactttccgcgttgacttcacagacttcggccgcaaattctggcaagccatggctgagtgccgcgcctggattaaggcgaatggcgtggagggatatctcagtctagttcgggcgaccaacaacgaagtccagaaattctctatttcggaaatggagaatgcgcgtggcgtggttcgtgatgacacgattgatatgtatctgatcaacgtgctgatcagttgcgagttcgaagagatcaagcctggcaggaattcaaagaatcctggatggagagtcaacaccatcgaaatcctgaaatggttcgatattctcgccaggaagaagccgatttctcgccacttaactccgcacctgaaggcgctaggatttgttccgaataagaatggcttgaatggctggtgcctgcctgtagataaggttgcgcctggatggaccagagatatgcacacgacgttgccgccgttcaatgatgtgcttgtatacttgctgaggaaggttgattctgaggtgactgatgaagaggcaatgattcaaatccgcaaagttaaggccgagcgcgcaaggatattgggtgaggatttctgatgtagtgatggagtgtacttggactaggccgccttcgggcggtcttttctttggtgcggagtacattcgatttcggttgtggccgagtgagattcggaagctatctggtaattagggtttggtggcgatggcgcgttgtggaaagttcgtgaacgttggatcaaggattttgtgcggtgattggatgaattgtggaaaatcgacgattctgactggatttttggggtcggccgcgccggtcttactggtaattaccgaaaccgggaatttgggtcgagccttagtgccgcgtgggcttgaagcgcttattcggatacttcccggtttcggatgcagccgcaaaagtatactacagcgaaaatcga

SEQ ID NO: 71 - DNA, 66687 bp, synthetic construct
  source 1..66687: mol_type = other DNA
aatcctaatagaaaaaatctatcacggacgttacctatctttaaaattaataaaattaatagtaatttggtaatttggtaaactttagtatttgaaagcctcgcggcactaagcttgtacatatcccgtcaagtttccgattccagccagctcgcggcagggtcgccggaaacttccggacttccaatccatgggtcgcggcaacaccacggcggactaagcggcaagtgccaaaactcgacgaacggaaccggaaatttgggagcgcgatagaatcgctcagctggacatatttctaacattcgatttaacactcaacccaaacactcaccaccaccatcgcccgccaccagccaatccgatcctcacccaccagcagaccgcccatataacatcctataacaccacctaacactcattcatcatcaaacccacccagacctacagcccacccacaagcagcccatagacgcgatccctggccccatagtacaatcgcgccatactcagtgtcgcgacagagcaccaggccccatccaccaaccgagccaccgcgacgactccagaatcgaactcagggacgcagcaccaaatgaccaaattctacagccccgacgatctagtcacgccacaggaattcgcagacccgcatttcgcggcgatcaaccaaaagcgattcgacctgtacatcgacctgcgcgtccaaggttacagctcctggcgggtcttccgggccatctggggcgaggagcatatggacggtcccgcgcaggcccgcatcttcgcgatggagtccaacccgtactatcgcaagcagttcaaggccaagttgaacgcgaccaaaacgtccgatttgtggaatccaaagacggcgctccacgaactcctccaaatggttcgtgaccccaccgtcaaggactccagccgtctgtcggccatcaaggaattgaacgttctggctgaaatcacgttcgtggacgagtcgggcaagacccggatcggtcgcggtttggccgatttctacgcatcagaagccgaggctcagaccgcgaccgtcgctgctgcggccgaagccaatggctatgttccggaaggcgaagagggcgatttcccgtccccgacgccggaaccgaccgaggaagatcgcgccaaccccatttagacataaaataacggctaaggatttaaggtaaggaggtttatttatgcatccgtttgaccaagctgtggttaaggatcctaccgcaagctatgtagatgttaaagcacgtcgtacctttctgcagagcggtcagctggatgatcgtctgaaagcagcactgccgaaagaatacgactgcaccaccgaagcgaccccgaacccgcagcagggtgaaatggttatcccgcgtcgctacctgtctggtaaccacggtccggttaatccggactacgaaccagttgttaccctgtaccgcgacttcgaaaaaatctctgcgaccctgggtaacctgtacgttgcgaccggtaaaccagtgtatgcgacctgcctgctgaacatgctggacaaatgggcgaaagccgacgcgctgctcaactacgatccgaaatctcagagctggtatcaggttgaatggtctgcggcgaccgctgcattcgcgctgtctaccatgatggcggaaccgaacgttgacaccgcgcagcgtgaacgtgttgttaaatggctgaaccgcgttgcgcgtcaccagacctctttcccgggtggtgatacctcttgctgcaacaaccactcttactggcgtggtcaggaagccacgatcatcggtgttatctctaaagacgacgaactgttccgttggggtctgggtcgttacgttcaagcgatgggtctgatcaacgaagacggttcctttgttcacgaaatgacccgtcacgaacagtctctgcactaccagaattacgcgatgctgccgctgactatgattgcggaaaccgcctctcgtcagggtatcgacctctacgcctacaaagaaaacggtcgtgacatccactctgcgcgtaaattcgtttttgcggcggttaaaaacccggacctcatcaagaaatacgcgtctgaacctcaggacacccgtgcgttcaaaccgggtcgtggtgacctgaactggatcgaatatcagcgtgcgcgtttcggtttcgcggacgagctgggtttcatgaccgttccgatcttcgacccgcgtaccggtggctctggtacgctcctcgcgtataaaccacagggcgccgccgcacaagcaccggtgagttaaagaaacgacaaagcccccggactctagctcagaatccgggggctttcttttgggcgccttattcgccagcttcgatgatttcgaagttgtatttgacgccttcgtgctcgaaagtcatcttgccagccgccttcagctgcatgcggaagcggatatgtttcgaagaaggcaggccgaactcgatgaatgctgcgttggtggaccggaactcgccgcgcttgcctttgacagtcacagccacgccatggcgctgagtgcgtttcttggaaacttccgggtctttccaggagttggcgatggctgccgacaggtctttggactctttggctttctccggagcgttcttggcctcttcgcgcatcttccggatttcttccagcgcttcctcttcggtgatctcttcttcaggcttcagattctcttcctcggccttctcttcttccttcttcttcttggaagtgcgggttttgtagactttggccggggcttcctcttcctgaaaggcttcttcctcggccggcagagcattcaggatggcgaggcagcgacgctcagcagtcttgcggtcagagaaacgcttgacggtcgcatcggcgttgtgagcgttgtagaaggcgaccagttctttcatttctgcgttctggatgtcgccgaaggttttgatggagttggtcattttgcgatcctctgttttggaagatttcgttcgggcttcggtttgtcgccccgttgaaagagattatgcctaggtcgatgctgcgtgtctacatttatttcatcagattgatcgcaaagccgacgaacggttgtctgatgtgaaaacaccgcagagcaggttgcggtgtttggtgggcgagggcgatggtcagaaagtcgggactgtgatcggctcgattggcgggtcgccgggcctgtcgttgtccgatgcgggcgccgggctggaagggatcgcacccgaccgaagcgccagcgattccgactgcctgcttacctgcggagctggaggcgcttttggcgcatgaggcgcgggcggaaccggcaggcctggaggagccatcggcgccctgggcggctccggaagatcgggcagatcaggaagactcggcgctatgccgccaaaggaccgctgcgaccgctgcgacggattgtcgccgaacatttcggcggatcggttgtccttgatgacttgacctatggcagtcttgtcgccacccggttctgctggatcgaagcccgtgaatggagtggtcacgcagcgcatgttcggatgggtcggcagattgttcaggacgatggagtccgcccagacatacgggtttttgtggttgccgggtccgtggctgatgatctcggcaggaatatggccgttcatggtgagccattccgccatcccttgccgagtcagcgggcttaccacgatctgaccagtggactcttcggcgacggcgaacagatcaccgagcttgaatccgatgatcatatagttggacctggactcgccgacgaaagccagagtttcgatgttgtggtggatatcttggtcttcccagatgtatagcatgatgtactcctcaataaggctgcttgttgtgctcgaccagagacataccggccggaactttgaagcggatgtactcgatcatcatcgccgtgcgacgccgattcgtgccagactcgtcattgacgaagagttcgcactgatgcggaatgactcgcgtcaccaggtcttcgcctttcgagccgtagaacttgatgtaggctgcgacgcctcgcgtcatgttcagatgaatcgtttcgcagagtcgctgcgcggccgacgcgctagacagatcggtcggactgaccgtcacccagtaatggccattttgttctttatcggacatcaactgccctccattgataaagccccctgccgatccgcagaggctggttgttgttagtcgcgcttcaacagaacgactttgtcatatgcgcgatatttaccgcgccagtcttcccagtgttcgccggccgggcagacaagctccagagtgatttcgtcgcgccagcattcgacggaaaggacaatcgccttgttcctggctgcggaatctgctctgagcttaatcagaatttcgtcgcccgttttcagttcatcgactcttaccactttggccatcatacactcctatgagaaggcgcggccaggacgatcccagccgcgccgatggattaacgtttgtgaaggatggacactgcgtccacgtcgaggatgctgatggtacggcgacggcgcggattgctgcgttcatggatgcgaatcaggtcagcggatggagcttcgtccaccacccatacatcttccggcttctgcgtccggagcaggaccgttacttctgtgttctgggcgaggccgttgcagatgaacaagaatttggacgagggagttctgtacatgtcgagattcctttttggacttcgggtccggcttttcagtcggtgaagagattatgcctgatcatcaccgtcgagtaaagcacttatggaccaattctccagttaaatggaaccacagcgcggtatcgctgatcgctacgctcccacgccatggcccttcttgcttacatacttcgaaccacaagctgatttccatccttgccaggactcggccgaaggattcgagccggcgccggctagccaggatgtcgacattcaaccgccgattgatttcgtatcggcgaccgtttatgacgaagaccagccgcagggtttgtccgtcaagacactcccagtatctggtttcatatcggagccaatagcgcttgccagccgggcctaccatggccatttaatcgatgctcctggccgcgccacgcggtccggtcggcgggacgggatcgaaccgacccaggatgtagtcgggccggcgcgcttcctgaggacacacggcgagaaggcgccatcctgcgtccagggcagactggagttcgtccgtgcagcagtcttccttgagcagcagacggttgacgttctggagattcggaccaggtatggccgatcctgtgagtgagttccaaccctcgattccactcaccatctccggttggttgatgtagcttacggacataccggccaaccggctcgcggccagctccagacgctccagcatgggtcgcagagcagcttccgggtcaatgtcgtcccagagaaggaccaggctgatgatggtatacggatagtccttgtccagatcccaggctgaagcggtcaggcggcccaggccgatttcattacacataacgggaacgtcgctgttccaggtggacggctcccagttccgctcaccaggattcccgattgttacgccttccaggttccccaggagaacgtggagcttgctgacatattccgcttccaaggctttccgctcttcgtcggtctggttgtggcgatagaaggatggagggctgacttttgcatgatagagtttcataactgttcctcggttttggaaggcttgaacgttagagaattgtgtcgcagtatttctcgaaaggactctgacgcttcttctcgcagatcgcacaggtgatttccaggtcgggcagctcgctgtaagtcttgccgagatacaaccagcgcttgcacagactgcggccgtccgacgtgaagaagtggactttgcgagcattgccgggttgcgcccagccgcttggtgccggcttcctgctcataccatcaccacgtcaatttcgtcggcgaagaagttaaagccaactccatctgcgtagccagtgtaacgcagacgagtcgtcccatcaatgtgggcttcctcgacgccgatgacttccagggtggtatcgttgcagtacagcttgacgaacatcttgatgccggagccaatcgccgcgaaggcgatctgcttgtacaggtcttgcttgatcatgctttacgctcctgtttgcggatgtattctgccctgacttcggcttcgaacttcgcccagagcgcgttgtctactggaccccagggaccggtctgagttccgtccaccggcgcgaacttgccaccggcgcgacgatacttggacagcgttctcaggctgatgattttctcttcttgggaatcgaattggacgatcacttgacatacttcccgaagtagcaggtgtggagtatttccaggcctttggagatagccttcagcttgatgccgaaattcttgatcgcccagtccagatcgtggtgatagaactcgatgatgttgacgatttgaccggcgctgtagtggatgacgcgaaccttgccgttccagcggaaatcttcgcggctgtttacggcctcgactgcgatggtgtcgtttctgccgatgttccatttggagctagtcatgtcgcaatcctctttttggagtgtttcgcgttcgatgaggtaactatacctcagccccctcatcgagtaaagcattttcttcagattatctgaaaccttttgaagacaggaattgccgccagagccagtcgatgtgttcgttgcagtaacgctcgccatcggacgacatagataaggcgccatcattgatgccgaagtgggccgcagcgagacattcgaactcgaactggagcgttcctgggcgagggatatgggacatggcgtatttctgcacggtcagtgatcctcagaaggtttagcgtttgcgatagccgctactttctgcataccgaggcgatagaaatcggcttctttcctggcttttgtaagctgctccatggcgtcgcacgccgtcttgtgctgggcattggcgttcttgatgctgccttccaggctcttgtccagctcttcccggagcgccttctgcgatgctagctctgcctccaaatcctggattctgagctggagctggcgatttgtctcgccaacctggttttcgctggcgatggagttctgaaggcattcgtcaaggcgagtgttttcgcgcaccagctgatgcttttcgactttcgcctttctgcacgtctctcgcatttctgaaagctcaatcgcatgcagatcgtcatccgggtctttacgctcttccttcgactccatccgcaggtagtactggccggctgcgaaggcgagcactgcctggtcggcatacgccgcggcatcggtcatgtatctggatttgtagcgaggcagaaacttgcactcctctggatcccagaggagactatcggcaataggccagaatttgcggaagccatcaggatcgacttctacattgaccatttgcagctggccggcctccacttcgacttccagaggaacctgaatggcgccggtgatgtactggaagtacactatgctagacataacacaatcctcataagaagtcgcggccgggaccatcccagccgcatcgtaatcactcttcgccttcgtccgcgctcagccactcttcgaaggcgaaatttaccttagactcgacccaatcttgaagctcatcggcgaactcgtcactgtcgatgtccatcggaatgcccagagtctcttcgttccacagttcggcattcagttcgaactggatagccggttcgccatccacattcagcaggatgcggtctgcgacttcatattcgtcgacatcgaagaggaaaccgccgctgatgatgtgctggatgaaagcttcgtcgaagttgctgacgccgatattgatctgcttagtcattttttctggccccttatttggcgagtttgtgctgagctttgagggtggtcagcttagctttcagggcgatcatagcctggccgcgcaggccttccatttctgcctcgctgatggcgatcttggcggagcggatttgatcgttgatctgggatttggtcatttctgcgttcctctgttttggagtgtttcgcgttcgatgaagagattatgacgctattcagaatggaagtaaagcagaattgtgaaatatttctcaaagtggacgaacggtatgccccgtcaggaatatttcctcccatggaaggcatttccgcatcagaatgttgattaggtatcccaaagcgcgcagtggcgaatgtgagtccgcacgtacatagggctgtattgtgcgaagtgctcgacggtcgcatccaaggctctgctattgccgcacccttccgctttgcgagccaggaagaatgcttctatttgctggtttgcgttcatcgtcttaccctccaggtgtttgttcgtttcgatgaagagattatgccgttggtcagaatggaagtaaagtgtattaacaataaaattatgttcaccgacgaacggttgtgctcgaccgtctgttgcggcgtcgatatactcgacctattgctgacaccggattgattagaatgtacaaactcaaccctgcactgcgagcggtctggcgaactcgcgcccgttacaaagtcatttatggcggccgggcgtcttcgaagtcacacgacgcaggcggtatcgccgtttacctcgcggccaactatagactcaagttcctctgtgctcgccagtttcagaaccgcatcagcgaatcggtctacacgttgatcaaggacaagattgagaattctgagtacaacggcgagttcattttcacgaagaactcgatcaagcacaagaggaccggatcagaattcctattctatgggatcgcccgtaacctgtcggaaatcaagtctaccgaaggcatcgacattctctggcttgaggaagctcattacctgacccaggagcagtgggaagtcatcgagccgaccatccggaaagagaactcagaaatctggatcatcttcaatccgaacgaagtgacagacttcgtgtatcagaacttcgtggtgaagccacccaaagacgccttcgtcaagatgatcaactggaacgaaaatccgtttctcagtgagacgatgctcaaggtcatccacgaagcttatgagcgcgacaaggaccaggccgagcacatatatggagggattccgaagactggcggcgacaaatccgtcatcaatctcaagttcattcttgcggccatcgacgcccacaagaaactcggctgggagccggccggatcgaagcgcatcggcttcgacgttgcggacgacggcgaggatgcgaacgcaactacgctcatgcacggcaacgtcattatggaagtggacgaatgggacggcctggaagatgaactgctcaagtcgtccagccgcgtttacaacctggcgaagatgaaaggcgcctcggtcacttatgactccatcggtgtcggcgctcacgtcggatcgaagttcgccgagttgaacgatgccagtcccgacttcaaactgatctatgatccattcaacgcgggcggcgctgtcgataagcctgatgatatctacatgaagctgccgcacacgacgatcaagaacaaagaccacttcagcaacatcaaggcgcagaagtgggaagaagtcgcgacccgattccggaagacttatgaagcggttgagcatggaaaggtttatcccttcgacgaattgatttcgatcaactctgaaacgattcacccggacaaactaaatcaactgtgtatcgaactttcgtcgccgcgcaaagacctggacatgaacggccggttcaaagtcgagtccaagaaggatatgcgcgagaaacgcaagatcaagtcgccgaacatcgctgactcggtgattatgtcggccattctgccgatccggaagcccaaaggtttcttcgacttctaaacacagaaagcccggatcgctccgggcttcgggtcttactcggtgtggttcctggcgctgagtgtcgacgcaacggcctcgccgactcccagggcttcctggccggccgcgagcgcttcggcttccgactcgacgatgaaatcatcaccttggccatcgcctggcggaacctcgaccagcacggcttcttcgccttcgaaccgcaggtcataggtcttttcgacggacagaccgtaacgagcgttgagcgcgtcccagagctgggcctcataggtccgcaggtcttgcagagctttctggtggctgagcatggccatgtcaacggcccgttgcagggtttcgtccaggacgttgaatcgcatgcgaagagaacgaatccgctcgaccacttccgcatccactacatgcctttcgatcatcgcttttcacctttgctgaatgtaacgttgtagccgttgtcggccaggtaggtcagggcgccttcgaaggaagttccgacgaggtgctttagcttcatttcgcgttgcgcggccagccagaatgcagttccggagaactcggcgcggccttcggccaagaccctgccatcaggcccggcgatacgtacatggacggaagatagcttgatcggcatcagtgaatacctccactggcttgcgacggcatgctttcggcgcgcgcgcggcttcgcagtccgggcagggacatgcttggcggacgcgctccagctcgtcggcatccatgacatagagcttcccatcggcagtgtcgtgcgccatggcgatgttcgggaagtcggtggcgctcaggccggcgacagcgcggatttcgtcccaaagcaccagatgctcggcattcagtcgggcggcgagcgcttcgtgctctttagcgacgcgcgccatgaactcgtccatccggaatgcgaattccgcatcgatggcacgggccgaggccatggagctgagtcgaatcggttctttcttcatgatgattctcttttggttggtggttgttcgctgctcaggcctattacagtctgagaagcatgatgaagatgaacgcaaggaacgcaaacggcacaagtatgccggacatcagctttgacaggcgctgcatctcagcgtatttctcggttgacattccgtgctgcgccgcctcagccgcgaagcgggctttcgcctcgataacttccgggcgcagcgacaggacatattctaaggcctcttcccgcgctttttcggcctcgaccagcctagggtcgcgggccgagacttcgctgtaccctggccttgcgggatgggcctgcagcgatggaggaagttcggcggccacgactccatagtcggcgcaggcccaagcgatcccgatgaggatcgcgaggatggactggacgattcgcagcatcactttgtcgctaggaaagcccatggttaatcctccaccgaccgaatgatttccatgttgcgaccggcattggtcccggcagtgtaggcgcgccgaccgtcactgtcgtccagacgcaggagtttggtaacattcgacttcttgtaacccggatcgccgaaatgttcgtggaccgcagcttccttaaccaccaccagagacgttccggcagaagataccagctccatacgcttcctggttatggactgaaggcgatagctgatttcctgggtcgcggccagtttgaattgcgcggcaacctttacgttgaaacgttcgtacccttgcgccttctgatactcccgacacagacgatcaatggcctcgaccagggagttgaacatgttcaccgccagctcaacgtccgacttgtagcctttgaagcgtacggcatgaccccagcgcttggtagtgcttccgtcgcgggcgctcctggatgccttagccgatgctctgtggttgttgatgccaccggcgaaatccatgatgcagtcattgtacgtcgccacggccactgagaaaaacttcatccagttcgggattgcggaatagtaacgagtggcaatttgctcatcgaactcttcgcgaatctcgccggtagcttcgaagtcgtgaaggtcatatttgtccttcaacttcttcacacgctcggctgcgatggccgcttcgtgcggactggaagagtcggctgccatggcggtcagtttgcggatgcggtctttcgccttctcgatggcttcaggggtgaattcgttctggtcggtcatggtcggttccttttgtctgaagggtttcgcatttcaatggagctattctgccttcattcagaatggaagtaaagcactttcttccactatttcggcatcgactggaagaaattccagatccaatcacctgctaccagcaagaggatgagggcggcaaagaacaagacagcggccgcgagctgtgcgcccggcttcagtttgggatggctgagcttgggctctacgggaacggccggagcgctagcgctgcaaccggcgtctcctgggccgtagccgatgccgcgttcacacgcctggaacgacaccagggatttaagatactcggtctgcttttgcgactcttcgtagatgccggcgacggcgaaccagagggcgaacactacggacgtacacacaacccaggcgccggtcagcaggagggccagcgggccgatgacgaagacggtagcagccaggacgattgcgccgccccagatgatgaagccggccagaccattagtgatgtcgacacagaactttttcattttcagattccttcggttacgggatggaggggatttgaaactctgcgccgccgagaacatcaatgacgacttcccagagcgtcggaacagaccactggtaacggtcgaagtcggtttcaggatcgacgcccagcgtcacataggaagtggcaggccatttatgaacactgcctttccgcatgagagtcgccacgcggccgtcaccgagcggattcgtcctgtgcggaacgtacgcagacatcgaatattgctgcccggcgtcgataacaaatctttgcctctggcgcagacatacagagcccacaggattccagccgcgaccgccgcaagcctggcgagccgaagaatgctcataaccttcgtgagtcatttcgccgaggcaagccgagcgatcctcgtaatagttgatgttctccatcgatccaaccagcaccagagactcgaaatcgaatcgatgatcgtggatggccgagtgattgaagcaaagccgacgcggcagctccgggtgccaaacatggaggcgaccggccggaagttggacctgaatgaaccccaggccgtgcagagtgatcttgtccttcatcgggtcatggacggtgctcatggataatcctcagtagcagaaatgtattgtgagagttacgattgataagccggtcgcccatagaagggcgaaccaggccatggctttgatggtcgtgtagatcatccgaagaattttccggcacagatcgggccaatgcccatttcgatggatgcgtggttggtcaactcgcgaccgcagcaggagcactgaccagtcttccgaccgtaggcgactgccgattccatcggcttttcgaacatcttcagaacgtcgtcgtgctcagtatcggtgcagtcgcgactcttgatgaatttgccatcggtgatccggccgaggtagatgtcgcccaggacgtacaggctaccggcgttccggctgtgagcgctagcctctttcacaacaacgatgagcggctcctcgccttcgccagctaggcggattttcgggcgcttgataccagactctttcgccttctcaaacgctttctcgatgccggaaatgtccagagtcggcgcagcagcttcctgcgcggccactttctcgcgatacttggcgaggttttcgatggcgcgcttcgcagcagcgatctgattttccgtcaaggagccgtatttatacaacgactcctgaaggctctgagcgaagctgaaggaatttccagtccaccactcgatgatatccgggtgcgcggcttcgaaagccttaattttgaggtcgcgttcttgcgcagcgctacagattttctcggcgcgcttttctgccgccttggcacggctcttggcgcgctgctccgggctggttttgtactctttgtatccgacaccgccgcaggcaaagcaggcgcgaccataagatgaagggccacggtacaggccggtgcctgcgcatttggtgcacttgtcgcgatacagcttcacttccttccgggagttcgggcgggcgcccatggacacatcttccagcgtcttcggagcttcgtcagtgatcgctacggtagcgaagtcatcgcccaggtcttcgaagccggtgaacagattctctgctgcgttcatgtcgattctcctgtttggaaagttcgtttcgatgagttgactatacgccagaaatggaaaaacggtagcgttttctcactaccgttcgtcgggtcgaagacaatcaataaatgtcgctattgatcttgaacccatgctcagcgccgtcgttgtagtcgtactcaacataactgtcgcagtagtcgttcaaatgctgaatgatgcctagaacgtcgttcgcggccttgtgccttttcgcggcgatggtcttggcgatgctgtcgccgacttccagggcttcggccgtccggcgatggatcagcaggcgactccaaagatagagccggacgcgacgaatgatgtcgcgatggcgctccagtcgtccgtgcaactcttcaatttcgtgctcgcgagattttaatactcgtcgaagctgttgaacttccaactccaaatcggccttagtagccatgttaacctcagaaaggaaaatcgtctgagactccaggaagctcgacgattattgttgagcctgatcggtctagaatgcatccgaccgagccagccctgtgtggatagggtctacacgaactataacaggtgacttccctgactattcgccaggtcgatcctccacaccatctgcaaattggcgggcgcttcgacttcagttttcgttcgtccaggacggcgcgtctgtcgcaggaaaggcagcgtgccttaaccgacgtaaccattggtatagtcgatcattcggatgagctcatcatcctctgattctctcgacttcagaccgcccaaagagtccgactggccgtcgcatttcgcatcgatatccatcgaagacaggaatcctgccgatactgcggtgatatcaactttgtcgccggccttcttgaagccttcgcactcagcatcgagggccacaattgcactcgcggccatgttcacatgactgatgaggtcggggaagatcacaggaacttcacgcgacatgccacggaccgtcagcttcaggactacatacttcatactcactatcccttttgtatgtgaggaaagaacttgctgttttccggatggtgaaaacgctcggtcgcaggcggtctttcttccggacattgaatcgtcgaaggcgggaaaaccgcgccggcgataatcgccgcgaggagtgcagcggatgtcgacatccagagggcggtttccaggctcacccgaacttccggacggcgcggcttcattcgctccaccctcttcctggctcataggatggcagaccgccgccgcgaatccaattgtcccacatacggttcagaccagtcggcggctggggcggcggactgtagaatccgggagtctcagtgctgctcaggaaataaggcgtgcaaacggcctggacgaccaattggtgccgctcccacatcttatcaatcgctcttagcatgacgtcttcgcactgagccttactgtcgaaccgtctgctagtatggtccggcatctggacgcagccgtctccagtgcaaaggaaagcagtagcaatccatacggtgatactcgccatttcgtcaccctctttagttgatgagcagagtctattccatctgctcgccaggagtaaagcgcttttcgtcgggataaatgccgatgatgtctgcgtcgagcatccaaatctccacggacggatcgtcgctgctgatttggtacaggttgtacagctcccgtccgccgacagcgcgctcgcctcgcggctcaaccgccagaaccttgccgtgcccttctccgtgctcgtccaggtatatgacgtgatcgccgacttcatagctttctttcgtgacgaggcgtgaacgcgagctgttctgcgattccactacccaggaatccagcacgccgcctttcatgtcgcgaaacaatcttgccgatttgtcgcaatcgaatacgcccagaacttcgccgtctttcaacacgatatgtacgattggcaaaagagtattcatgtttaatctccattggttgataattagagtctaatctgccgaaaagttcccgtaaagaattattttctcataactgattagttgcaactgttaatctgatgtatatgtttgaatctcttttgaacgtttgatgtttcccctataataagcgcacacagccaacaaccacgtggaactacaatgtttaaactttcctggatattcgggcgcaaaaaggataatgctgcctgttctgaatcggcgccggagaaagtcgcaaaaatccctcaacacgatccgctcgacccaatgatcaagctgggaaggattcgcggctggaacgtcgagccggagaaagccccggtaattcgtagcgtgaaagatttcctggagccgggcctatctgtagcaatggatagtgcgtatggtgatggaccaactccggccgcgaaggctgctgcgggcggccagaatccctatgtcgtcccgactatgttgcaggactggtacaattcccaagggttcatcggataccaagcttgcgcaatcatttcccaacactggttggtggacaaagcttgttccatgtctggggaagacgcagcacggaacggatgggaactcaaatcggacggcaggaagctatccgatgaacaaagcgcgctgatcgcccggcgcgacatggagtttcgcgtcaaagacaaccttgtcgaactcaacagattcaagaacgttttcggcgttcgtatcgcgctgttcgttgtggagtctgacgatccggactactacgaaaagccgttcaatccggatggaatcacgcccggctcctacaagggaatctcccagatcgatccatactgggcaatgccgcagctcactgctggctcgacggcagatccgtcttccgaacatttctatgagccggatttctggattatcagcggtaaaaaatatcaccgcagccacctagtggtggttcgtggaccgcagccgccagatatcctgaagcctacatacatcttcggcggtatcccgctcacccagagaatctatgagcgcgtgtatgcagcggaacggacggcgaacgaagccccgctgcttgccatgtcgaagcgaaccagcaccatccacgttgacgtggagaaggccatcgcgaacgaagaggccttcaacgctcgcctggcgttctggatcgccaaccgtgataaccacggcgtgaaagttctgggaattgacgaagacatggagcagttcgacacgaacctggccgacttcgacagcatcatcatgaaccaatatcagctggtcgcggccatcgccaagactccagccacgaagctcctcggcacttctccaaaaggattcaatgccactggtgagcacgaaacgatttcttatcacgaagaactggagtccattcaagagcacatattcgacccacttcttgaacgccactatttgcttctggcgaagtcggaagaaattgatgtgcagctggaaatcgtctggaatcctgtggactccacgtccagccagcaacaagccgaattgaacaataagaaagccgcgaccgatgaaatctacatcaactctggcgttgtgtctccggatgaagttcgcgagcgtctgcgtgacgatccgcgttccggctacaaccgactcaccgacgatcaggcggaaaccgaaccgggcatgtctccggaaaacctggccgaattcgagaaggccggtgcacagtcggccaaggcgaaaggcgaagccgagcgagccgaagcccaggcgggcgccgtagagggcgcaggcggcccggttcccgccgctccacgcgggactaagcctctcgcgaaagcgtccgaggaaggggccagcgaggccgctgaaccgccgtcgaggccggaccccaaggccgagctgcggaacttgttggtcgatcttttgtcgaagctccaagacctggacgacattaaggcgccggacggcgtagacatagagcacaatgatgcgcctggcttaaagcgcacatccaaacctggcgtgtctggtatggagccttcggtgttttcgtccaaccgcatcgtcgggcctcgtgatcattcggaactccagagaatcaaggtgaatggaataaccaccttgatcgaaaatccgcgcggaagcattcgacaaggcaaggatgggagttggcgagttcagatgaaacaccactacgggttcatcaagggaacgaaaggcgctgatggggatgaagtcgattgcttcgtcggtccgaatctgggatccaaacgggtcttcgtcgtcaaccaagtgaacaaggaaggtcagtttgacgagcacaagtgtatgctcggcttcaacaacatcaacgatgcgaagtctggatatctgtcctgcttccgtccgggctgggatggtctcggctccatccatgaagttgacctgcccgctttccgtcgctggctggcgaacggcgacaccaccaaaccgttcgggggcgagtgatggcattcaaggcctccaaaaagcgcgagcgccgggcacctcttccagtcggaagagggaagcccataattccatcggcaggaatcgaggcctggtatcgaaagcagatgaaggatatgtccaagctcatgatctccgactatcgaaacgagattgagaaggcgctgtcccagcctgcggccgaacgtttcttcgccagagacgaatccgttaacgtcctgttcaagatgacccttcgaagcctacagcagcgatggagccgcatttttgaaggtttcgcggccaagatcgccccggagttcgtcaaccggaccgaagaagccgctaccgccgcgacccttcacagcttgtcggtggccggcgtcgatcagccacgagctgcgtataatgagagcgtcaggaacaccctggaggccgcaaccacttacaatcatactctcatcaccaagatccaagaggaagtccacgagaagatttacacatcagtaatgctgtctctgacttccccgaatccggaagagcaaggaacttccggcataactaacgcacttcgcaaagtcgggaagttttctgaagatcgaatcgaactcatcgcaagagatcaaacaagcaagctttacagttctctgagcgatgagagaatggcggaaaatggagtcgaggagttcgagtggctacactcttctgccggcaagactcctcgccacacccacctggagaaagatgggaagaggttcaagctgaatgaccccagactttgggagggtccgaaagcagaccaggggccgccaggatgggcgattaactgtagatgcagaaagataccagtcatttgacatcgataggagcgctatatgccgttagttcatggcacttccaatgaggctcgttctgaaaacatcaagcgggaaatcgaagccggtaaagacccaaagcaggctgcggccatcgcttattccatccagcgcagtgagaaagggaagacggcgaaagattgttcgcctgagctcgtcgccgatcttcgcgccctggtggacgctctgtcgaggctcgtgaaatgaaccgcaagacgtgccggcgccgactcgtggtcgatgtaatcagggccaatattcacggcggattcttcagcctgaagtttgccgccatcgatttggcaatcatcggcgtcgccatcttgatggcttttggccgatgatgctgagaaaaatctggattctgactaaaaattctagtccggatagccgcaagttaccgtttacggaaaatagcagtaatttggaaatcctactgccgcgaggctttaacagagccagttcctaatttccgatttagccgcatgcttcaaaagtatatagcctgggaaattagaagtaacgttccaatagaattcatctataagtaacgttataatataacgtcaatctatatgctctagacgtattgaaattcaatttttaatcggtaaattggtaatttgaattagtttaggagttgaaagcctcgcggcagtaggcttagacaaatcccgtcaagtttccgagaccaaattaccggattttcgcggctgaggaaactggtaattagatcacaatacaaattataatgtaagttaacagtcacggctacatctaattattgttccgcttatttacccttagatgtactgcgtatataatacagccatagtccacgactcttcgaattaacgatggcaaagtcgaaaagaaaaattgacgaaaatggatatatgaccatagagggctgcccgatcagctcttatggcgttttccaatattctgctggtcaactcggtcttccgggcgatccgacgcggattgtcaacgtatatcgcccggagtctgccgtcagcgatccggagtacatcgaatctctgaagaatctcccgttgatcgacgagcatgagatgctgtcgggattcgacgatgatgacgatagcgtggcccccgaagacaaaggggtggagggcatcatcacctccaacgcttactacgaagccccatgggctcgcggcgatatccgcatctattcccgcaacatgcagaatcagctggaaaggggcaaagaagacctgtccctaggctatagttgccgctacactgagcaacccggaatctggaacgggacgccttatgaagtcgtccaggacaagatgcgcggcaaccacatcgccctggtaaaagagggtcgtgtgccgggggccagagtattggatggtctgtgttttgaccatctcagttttgatttcagaccatccgatgagggtaatgaaatgagtctcaagaaagccaagcggaagccccctgtccagcgcgtagggcaagctgctgactcggcggtcgaagagttgcgcgccctgtggccgaagctatctgcgtctgtccagaagttcctgggcgaagaagagcaggagccggagcatcaggaaggcgcagctccggccgaaccgaccgacagcgagcacctgaccgagcatccgactctggaaggtgctcagaaggatgacgaagagcaggaagaggagccttccgttgtcgatccggccgtggccgccgtcgagccggagcatcaagaaagcgccgcatccgaaatgtccggtgaaggcgaagtcgccgaactgatctctcaggtcaaagccattctggctcgactggagggcacggtagccgaaggggcggacgaagagcatggcgaaggtcaagatgtcgtcgagggcttggaagagcagagcagcctcagcggcgcgcaaaccgccagcgacgatggtggtgagggcaaggataacagcgaggaacttcctgaaatggcacagaagaacgcgcaagatgctgcaattcgcggtctctatcgcgacattgctgctaaagatcgcctctacaagcgtcttagctccgtggttggtgcgttcgatcaccgagctatggactcggctgaagtcgctgtttacggcgtgaagaagctgaatatcagctgcgcgaagggccaggaagcactggcgctcgacatgtacctgaaaggtgtcgaagccgcgcgcggcgcggccagccgtcaatcgaaagcccaggattcggccggttctgctccgcagtgcgccgagctggacagctacctgaagggggagtaactcatgttccagaaacaagtttaccgccagtacactcctggttttccgggcgatctgatcgaggacggcccgaagcgggcgcggccgggtcgaatcatgtctctgtctgccgtaaatccggctgccaccgccaccggccccaaccgcatcagtcgcgctttcggttacgccggtgacgtcagctccctcggcgaaggtcagccgaagactatcgcggctcgcgcttctgaagtcgtgatcggcggcgccaacttctttggtgtcctcggtcatccgaagcactatgcgctgttcggttcggccggagactccctggctcccagctatgatctgcccgatggcgccgaaggcgagttcttcgacatggccaccggcctggtcgtcgaaattttcaacggcgccgcaaccgccctggacctggactatggtgacctggtcgcctatgtaccaaacaacctgcctaccgccgacaacgcgcttggcctgccggccggcgccctggttggcttcaaggctggctccatgccgaccggcttggtccagattcccaacgcacgcatcgttaacgccatcagtctgccggcccagtcggcggggaatctggttgctggcgttaccatcgtccagctcacgcagtaaggaggcgtcatgagccagatcagcaagacccattcgcgcctcgcaggccgcaatgcgaaacctttcgacctgaaaaacatcaccaatgacgccgtggcgtctctgcgccgcatcggcctggtattcgatcacgccgtcgtccaggaccagatcaaggccttggcgaaggccggcgcgttccgctccggctcggccatggacagcaacttcaccgccccggtgaccacgccgtccatcccgactcccatccagttcctgcagacctggttgccgggcttcgtgaaggtcatgaccgctgcacggaagatcgacgaaatcatcggcatcgataccgttggctcctgggaagatcaagaaatcgtccagggcatcgtggagccggccggcactgcggtggaatacggcgaccacaccaacatcccgctgaccagctggaacgccaacttcgaacgtcgcaccatcgttcgtggcgagctgggtatgatggtgggcaccctggaagagggtcgtgcctcggccatccggctgaacagcgccgaaaccaaacgccaacaggcggccatcggtctggaaatcttccgcaacgccatcggcttttatggctggcagagcggcctgggcaaccgcacctatggtttcctgaacgatcccaacctgccggcattccagaccccgccgagccagggctggtccactgccgactgggcaggcatcatcggcgacatccgcgaggccgttcgccagctgcgtattcagagccaagatcagatcgatccgaaggcggaaaagatcactctggccctggccaccagcaaggtggactacctgtcggtaaccacgccttacggcatttcggtttcggactggatcgaacagacctatccgaaaatgaggatcgtgtcggctccggaattgtccggcgtccagatgaaaaaccaagagccggaagatgctctggtgctcttcgtcgaagacgtgaacgcggccgtcgatggcagcaccgatggcggcagcgtgttcagccagctggtacagagcaagttcatcaccctgggtgtcgaaaagcgggcgaagtcgtacgtggaagacttctccaacggcaccgccggtgcgctatgcaagcgtccgtgggctgtggtgcgctacctcggcatctaacagatgcctattcaccaaaggccgggcttccggcctttgttcactctgactctaactcggttgtaggggccggttagggcataattactaggactacgccaatgactgtttatatcgtttcctccatgactcaatcggtgtcttacaatgcgtatgacacctctgatccgtccaatcctcgcctccagcgaaagattctgattcgcggccgcgcaggcatcgcatccgaaacttccggcttcggcgacatgatttccgacgaggcaggacgtccgatctggaccccacagggcgattgcactgccgtgagcgattcggatttcgagctgcttcaggccaataagattttcatgcgtcacatggagaagggttatctgcgagtcgtgaagaccgacatcaccagtgaccaccagcggatttccaaagagactcgcaccatggagcgcgatggattccagcctctggatgctactcgcctgcagcagaaaatcaaggtgaccacagccagcgcttcccaggaacaagagttccggatttaaccgagggtttcggtatggtgattttcgacgaacataagtttcgcacgctgtttccggagtttgctgatccagccgcttatccggacgtgcgcctgcagatgtacttcgacattgcgtgcgaattcatttctgatcgcgattcgccataccggattctcaatggtaaagccctggaagcctgtctgtatcttctgaccgcccacctcctgtcgctgtccacgatgcaagttcagggcgcggctggaggtggcgtcactgccggtgggacccagggcggtttcatcaccagcgctactgtcggcgaggtcagcgtggccaagctcgcgcccccggccaagaatggttggcagtggtggctttccgggacgccttatggtcaagagttgtgggcgctcctcagcgtcaaagcggtgggcggattctacatcggcggtcttccagagcgccgaggcttccggaaggttggagggacgttctggtgatccctggtgcgaatcttctgcgaatggccttcggggtcatcggtactcaaattgtgaaatatcgcaagtttgagcagcgagtgaagaatgatcaagctcagtacgtttccatgttcgaggagcctttcgacctggcagcgtctgttcagcgagtccgacgcgatcagtatgtccagtttaatctggagttccaacggaattacgttatgatcttcgccaactttgagatggttgacttggatcgcgatgtggccggtgaccagttcctctggaccggaagagtctttcagctggagtctcaaggctcctggttttatcaagacggctggggagtttgcctggccgtggatatcggtgcggccaagctcactgatgacgggaaaccgactttctaggtgatgtatgtttgacggcgaactgatagcgaaaatggttgtcgagctgaatgcggcgatgacatctgctcaagaggctttgcagttcccggattttgaagtcgtccagaaagctcagccgacccaacagggaacgtcaaccaggccgaccatctttttccagaaactgtttgacattcctcgcggctggcctgccaccgattggcacctggacaacacggctcgcaaatatgtagaaataactcgacagcatgtagagacgactttccagattagttcccttcattggcagaatcctgaaataactcacgtggttacggcttctgatatcgccaactatgtgagggcttatttccaagctcgatccacgattgagcgcgtaaaggaactggacttcctcattcttcgcgtgtctcaaatttccaacgaagcatttgagaacgacaatcaccagttcgaattccacccaagttttgacatggttgtaacttacaaccaatatattcgcctgtacgaaaacgcagcatattcggccgatggggtattaataggcatatgagtctgaggcgcgattcagagctaatcgccgcgcacctccagatgttaagagccatgcgcggcaggtccgtttcagccggatggtattccacggctcgatatcctgacaaggcaggcggatcggtcggaatacaagtcgcgagaatcgcacgtctcaatgagtacggcggaactatcgaccatccgggcgggaccaggtatattagggacgccattgttcggggtcggtttgttggcgttcggttcgtcagaaacgactttccgggagaaaccgaggtaactaagcctcacagaattaccatcccggctagaccgtttatgcgatatgcttggaacttgttttccgcagatcgcgccgcaatccagaaccggatagccatgaggctggccagaggacagatcactccagatcaagctcttgcccagatcggcctggcgttggaaggatacatagccagaagcatcaggaccgggccatgggtggctaactcagcatctacggtcaggagaaagggattcaacagaccgctggtcgatacggcgcacatgcttcaatcgattagcagcagagtaacataaccaggagatcatccagtgatcagtcagagccgttatatccggatcatttcgggcgtaggcgcaggcgctccggtcgcaggccgaaagctgattctgcgcgtcatgactaccaacaacgtcatcccgcccggaatcgtcatcgagttcgacaacgccaacgcagtcatgtcatacttcggcgcgcagtcggaagagtatcagcgggctgcggcttatttcaaattcatcagtaaaagcgtgaattcgccgtccagcatcagcttcgctcgctgggtaaacaccgccatcgcgccgatggttgttggtgacaatttgccgaagaccatcgccgatttcgccggcttctcagcaggggttctgaccatcatggtcggcgcggccgaacagaacatcaccgccatcgatacgtccgcagcgacttctatggacaacgtggcgtcgatcatccagaccgaaatccgcaagaacgccgacccgcagctggcccaggctaccgttacctggaatcagaacaccaaccagttcaccttggtcggcgccaccatcggcaccggcgtcctggctgtggcgaaatctgccgatccccaggacatgtccactgccctcggctggtccacctccaacgtcgtcaacgtcgccggccaggctgccgatcttcccgacgcggccgttgccaagagcaccaatgtcagcaacaacttcggttcgttcctgttcgccggtgcgccgctcgacaatgaccagatcaaggccgtgtcggcctggaacgcggctcagaacaaccagttcatctacacggtcgctacttccctggcgaacctcggcactcttttcaccttggtgaatggcaacgccgggaccgccctgaacgtgctgtcggcgactgctgccaacgacttcgtggagcagtgccccagcgagattctggccgccaccaactacgatgagccgggcgcttcgcaaaactacatgtactaccaattccctggccgcaacatcaccgtttccgacgataccgttgcgaacaccgtcgacaagagccggggcaactacatcggcgtcacccaggccaatggccagcaactcgcgttctaccagcgcggcattctgtgcggcggtccgaccgatgcggtggatatgaacgtctatgccaacgaaatctggctgaagtcggctatcgctcaagcgctcctggacctgttcctgaacgtcaatgcggttccggcgagcagcactggcgaggcgatgaccctggcggtgctgcagccggttctggacaaggcgactgccaacggcacgttcacctacggcaaggaaatcagcgccgtccagcagcagtacatcacccaagtcaccggtgatcgccgcgcctggcgtcaagtccaaaccctgggttactggatcaacatcaccttctccagctataccaacagcaacactggcttgaccgagtggaaggccaactacacgctgatctattcgaagggcgatgccatccgcttcgtcgaaggatcggacgtgatgatctaatggtttgcggcggactcgatccgccgctaccttccataaatggagtgaggaataagcaatgatcaacatttctgcgttcggctcgatctgccagttcacggcaagcagaactttcccgaacggattcaccgtcaccgagttcgccgacgatgccgatcccatcgacagcccgccgttcaccgctgccgataccggcgtcggtctcaacggtgacatggtagtttggaaccgggcgaacatcctggaagtagtcgtcaacgtcattccgaataccgagggcgagcgcaacctggcagtcctgctggatgccaaccgcaccggaaaggacaagtcgggcgctcgtgatgtcgtcggtttggtcgtggcgatgccggacggcagcaaaatcacctgcaccaacggcaccccaatcgacggcgttctgatcaacgcggtggcaagcgtcggccgtctgaagaccaagccgtatcggttccgatttgaaaaagtgatcaaagccggtactagctgatgaagaaaattccgctgacagcagtccccaatcaagcgatctcatttaatgccggtagcagctattggaagattcgcctgtaccagaacatggacatgatgaatgccgatatcagccgcgacggcgtgatcgtttgccatggggtccgctgcttcggcgggattcctcttctccaatacagccatcagtaccgacctgactatggcaatttcgtcttcgaccgcgacgccgattggacattgttcggcgacggcatcaacctgttctatctggacggcgccgaattcgccgagtatcaggcgcttgccacgaggaaagaatgagcacatcaacgatcagaaccgggacgaacaacgatatccttttggacgacaatggaaacatggttatcctcagggatgtcgaagcgtgcgcccaggacgttcgggcggcgatgctcatgcgcaccggcgaaaacattttcgatgtgaactccggtgtgggatatttcgaatacatcttctcgccgcagaaaagctatgatgacgctcgcaaatccatcgcggatgcaattttatcctcaccggatgtgaccggcatcgagcagcttgacatcgacataaccggggaagtcttcggcgtcgatgcgaaagtcatcaccatccacgggcctgttaccgcaggagtttgaaatgagtaccatccgcatccaatacgccaacggcacccaactgttcctggacggcaaaaatccgccgcccctggacccgctgccctcgtttaacccgtctgtcgaagatctggaaggcctggaccgcgaaaagaacaccgacaagggcgactcctcgccggccggtcttcccgttcccccggtaaacgtcgattccaatgtcgacaacggcggaaccatcccggctccggtatcgaccgacgctgctgcgaccgaatcggccccggaaggcgcccaggaagctcctgcagcaggccaaggcgacgagaaaggcgccgaggaagccccgactacagccccggtagaaaaggccgaggaaacggcctcgccggccgctgaagaggaaaccccggctcccgccaaggccacctctcgcaaaaccaccagcaagtaaggactcgacatgatcaacgtcagcggcttcggcacaggaattgtaatagtttccgcctcatcgttcccgatggggttttccttgtcgaagttcgctgatgatgagagtccgatatcctccaaagagctggagccgttcggatatgagatgctttatgacggtggcctattcgcctttgacaaggctgctcctctggaagtatctgtatccgtcatcgcagggagcgaggatgatattaaccttcgcatccttctcaattccaaaaagggatcattcagatttcttccgggaatcatcccggacatgacgactctcgtggccactcttcctgatggcggccgcaccgttctgtccaatgggactatcatcaagggtccggccatcgacaccatacagaacaccggacgacgcaaaggcaacacgtacacttttgttttcggtagctatcttggcgcccagactgcgcgtcaagccatttctaacgttatccaatcggtactggaggtggtctgatgttagggattttcaccagcctcctaagttcgcgatctttttcgattgtggaccaaaacacaaaccagctagttgctgcggatttgaggataagccgggtcaacacccggttttcttctgtagggcaacgccacatgctggaagatggtacgaccaagatggattccagaacgatccaccctatggaaatcatcgtcgaagtattttgcccttcaattgatgtcgtcgatcagatcaatcaattgctcctggatcgcgacacactgtacaaagtcatcactcgcggcatggtattcgaacggatgatgtgtaccagcgaagcgctcaatcagactccggatatgatatcggcgactcctgcgcggctgacattctcccaagttctcgtccagaatcccaagcctataatgttcagaaatgcaggggactcttctatgatcgaccgagggctggccctagctgaagacgtggttggctcggccggcgatctgttcgactacgcagtgaacggcgtccagaacgccgcagacttgttctgaggtgccaattgaactctttcctcaagtctattctcaacacgcctactctcaccatacgcgatgatgtcaccaaacttcctgtctggaagagtcttcaagtcaagaaagtggaaatttactcgccggcttccgtagtgtcgaaacctctggcgacgaaagaccagacggaagctcaagtgtacaccgaagctctggacattgatgtgaagaatggaaagatcatccaaccggtgcgactccgcatcaatgctatctgtccggacctgtccaccgttgaaagtatcatgaacgccttcaatgataacacctcgactttcgctatcacttctaagtcgatattggccgataaaatggccatcatggcgctcgatgtagatcagtctccagacatgttgaacgcggctgagatcaatatggaattcgagcaggttgagcctccagtattgaataaattcgattctgcgttccctcaagatagtccgacttatggggtacagattcaatctctttctgatgctaatttgctggatttgggcgccatcggcgattcgatatcttcggccgcaaaatcgctatataatcgcgtgaccagctacttctgaggatgtatcatgcttgaaatcaatcttcccgatggccgtcaaactcgcgtacaaatcgaggcgtggtcggcattggatggctgggaactccagcgccgtttcgtcgaattcgctgtcagccaagattccgacttccgccgctctttcaccatggaaatcctgggctatgcgaaagtgctgcttggcgacgatgacaccggcattccgctgaccaccgcggcagtcatcaacaaccacctcggccactggaagaacgtggaactggttttcaactctgttctcaagcacaatggcatcgacccggccacgcacgccgaccggccggactattgggaacaagtcggatcgcagatggccatcgcatttctggccgaggcgtccaagctcattggtccagcaatgaagatcgccgaaggactcgccaacaagccggagtgattcatgtctagtgatttggatgaattcatacttcggtatgaggccgatactgccagagccgagcgcaatctggagcgcctccagaaccagatcaggcgcgtgaacagcgcatcgacgagtggccttcaggatttgcgccacttcgcagacggcgcggccactgaactcggccgagtcgttccgcagatcgattctgtgacgagcgcgattcgcgggatgaacgcgcaactggcgataggcgccactggcgtggccctggtcgcggccggcgtcaaggcgttcatgaacaccagggaccagtacaatcagcagcgcatccaggcgatggacatcggcatcgccccggcacgcttggaagagtaccagagaaaattcgttcgccagtccggtggaaccatcagccgcgagcagggcgcggagatgaccaaaaatctggcagacactttccggcgagcctatcgcgatatcgggcgagtcggcccagaggcgcggattttgcgaatggccggcgtcgatgtcgggagcttccagaagggcatgcggccgctcaacgacatcattactgatctggccacgaaaatggccaagctgaagccggacgaaatttctgcctacgctgatgcccttggcgtctcgcgagactacctgagcaccctggctaagatcggcccggccatgggaaaagtcaccgagatgacgactgcggaactccagtccagggtccagggcgagtccaacattcagaaattcaacgatgctctggcgaatctcaaccagacgttcaccaccctggaaaaccgagtcggcgaaaagctcgcgcctgcgttcaccaagctgatcgaaatcatcgacaagatagtccaggctattcccaatgaagtggaaagcttcgcgaaggacaccaaatcccgttgggaagatggagtgctcgggaaggcgaccgttggcagtgatatcttatccctcctcagccccggcgccctgctcggtcgcctggcagcgtgggggactcgtcgcggcatggaagaatcagggctcatcgacaaggacaaggttcccggcgctcaaaccagcgaagacctggccaagaaacaagaagaccaggacaaggctactaagtccatgaaagagctagagaagctggctgaccagaccacgaagtctaccaatgattttgcggtggcgatcaacatgttcagtggcgcggtatcgtcgttcgcgaatgccgttgacgagcgccaagcttgggcagcctgggcgggggaaattggtcgggcggtcggtatgggaagcaccgcgccgacttcgcgggcaaccggcgtctatccgcacgcgatctatgatcagtcgaagagtggcgcggccggacaagtcttcggcgagccaatcggcgcccagtctcttcgcaatcgcatgttctcgccgcagcgcaaggccgaaccggtcaccgttccatcgtacatcaacgacatcatcaaagatgcgtcgaagatgtacaacattcctgagctggacatcaagaaactcatatacaccgaaagccgattcaacgccagggctaccagcgaagccggagcgaaaggcctcatgcagctgatgccggaaatcgccaaggcgtatggtataactgacgtatatgaccctcgccagaacatcctcggcggaacgcgtctattgcgggaaaacctggatcgagccaatggcgacatgcggctggccttgacctactatcacggcggcctcgatccgaagaactggggaccaaggactcgcgcatatccgggtttggtgatgagcgctccaatcgagctgatggaagaggcgcagcgcaagcagaaggctgcggccatgaccgccgccaacgagacgttcgctccggaaggcggcgacatggacattcgcccctatgatggcggacgattggaaactccagaccagggcaagaaggaagatgagcgccgcgaagcccgtcgatatgacgacagggttgtgcgaccggaaattcgcatcatcgaccgcatgccagaccgcagcgacggcgaaatcctcaagatgtctagacgtcaagaggccgaccgggcagattctggattccggaagttcccgaatcaagttcgcggcgagaccaagcagaacatccaggctcaactcactgcaggagccatcgcgcaagtgatcggcgttaaccccaaccagatcatgcgccgcgaaatcagccgttctgacttgctgttcggatacaaccaagccatcctgggcaagcaacaggagatcaaggccgccgcgaccgaagccaacaacgtattcctgtctccagccaagcttgccgaagccacggccaaggtgaacgccgcatcgcgagaaatggatattctcaggacatacggcgagcaacttctgaagagcgctccagagcgcggccaggagctgaccatcggtcgaatcgacatgttggtcaacgtcaccggcgcgaattctccggaagaggctcgcgagatattcagtaagcagactgcagaccagctgactacggcaatccaggacgctcaaaacgattccgcaactaagatactctactgatgaaaaagagaattctgcgagtaacattcaacatgccttatggacccgaagtcatccgcgaagatctggatgttcgggtccggattatgaaggctgcgttgcggattcagaaccgggcgacgatggaaattttcggcctcaccactcagctgcgcgagtctcttctgtcgcagttcaccgcgtggaagcaccggcaacgtcaagtgggcagggaagatgaattgatgatcaaggtgtcggtggaagccggctactctgaccaggggcgcgagcaagtttccagagtctttgtcggcgaagttgccattgtcgatatcatttctccgccaccggacattggaatccgcatccagtgctataccaggcaaatcgacaggacgaagaccattcggaatatgccgcccgccaacacgacgtttgtcaagttcgtcgagtggggcgcgaacgaaatgggattgaacttcatctgcgataccagttacaacgatcaagttctgaagaatccgggccggtctatcactgtcgcgtcggcaatcctggcgtcgattcaggatatgtacatgccggacgtggccgcgttcgtcgatgatgacatattgatcgtgaaggaccgcgataaagtcattcgtccggatgaggtgaccaacgtcaactcgtttgttggaattccatcttggtctgaatggggcgtggaattccagtgtctgtttgagccatcgattcgtgtggctggaggcgtagcggtcgaatctctcatgaatccaagtgttaatggtaactatgtaataactgctctggaatacgatttggccagtcgggatcggccgttctatatcaaagtcatggggagtccagcagcataatggccagggaaatcaaatcattcaacatgttcggagttcactatacttcgcggcaattctctgccgtcgatgggctcagcatgatgtcggaaattcagagcgtgccgccagaagaattgctcaagggtactgatgtattggcgcatccggaagaccatccggaaggcatctggcttccattgactgctgcgaacatcaatctttatgtcgttgatcgagcgaaagtaatagctcccgtacaagttcttgcacttctgtccgaagtggtaatcgactggaattttggttttctcaaagactggaccggagtcaagattccatccagatttgtcgaagatatcaaaagcgtgaagacggcacattcaccttctgtagttgcgagtttggtggcgaacggttcggcctctatgcgcgagttggaagagtattattcgactcaagatgcctttaagatgatagatatcatgacggcgaagagcgtgaacgaggccttggcgtccgaagcatcgcacaacagaatcaaaaagggataattcctaaccgggcctgggaaggctatactagacctgccaaatcagaggctttcccatgtccaatatttctctaacatccgcaaaagctcccgacaggacgcgactgatcgccgctcttgacgctcggtcgcggcgggatgctctagatttcgaagtaatgataccggctcaggttgttcaatatgaccgggccgagaatatcgcgacgattcaacctctcatcacctgggttgacacggaacacaacgccgtccaaaggcatcagctggttgatattcctgtaatttccatgggggctggcggcttccacataagtttcccgattcagcaaggtgacataggctggatttatgcggccgaccgcgacacatctcagttcctggagtcgttgtcaatgtcgaagccgaacaccggccgcatccataagttcgagcatggcctgttcatcccggacgtattccgtcgatacaccatcaattccgaagattcggccgctatggtcatacaatcgacttccggagcgaccagaatttcgattcgcggcgacaacatcaagatcactgcgccgtcgaatgtcaccgtggatactccgcaggcgaatttcactggtgatgtgactatcgctaacactctggttgtaaacggtatcaacgtgaacaaccacggccacctcgaaaacaacccgcctgatgcccggacgaagggcggcatgattgcttaaggagaatttcatggcaagttttgatttttctgatttaacagcgggggggggttgtaatggctaactacaactacatcgtcgatactggtgtgatagtcgcagataccgccgacgttctgagcgacgttgaggccgagttccgcgccgccctcggtgccaatatcaacttggccgcgagcactccgcagggatcgcttgtcgcggccgaggccatcgcccgttccagtgtcatgcggaatgaagcgcgaattgccaataccataaacccgaacgtttcattcggaacgttcctggacgcgatctgtgccttgatggggatcgagcgcggttctgacctgtcaaccttcggctatggagttcaagtcaccggccgcagccaaacccgcatttccaccgggtctagggtccagactccggccggcgcgatcttcacagtgatgagtgatgtcacgattcctgctggtggtgtcgcgaccatcgatatcaaatcgcaggagtatggcaacattcctctgccggtcgggaatctcatcatcatcgacggaacaattggctggtccggagcgaaggtcatcgcctccactcgcgtcgatccgggcagccgccaaatgagcgatgcagagttgaagaatgcccgcgttaatcgattggccatccaaggccgcaactcgactatggccatcaaggcgtatgtgagcgccgttccaaacgtcacgtcggtgaacgtaatcgagaacaacaccggcgccgttcaagtggtgaatggagtctcgtttacccttccgtatgctgtttgggtctgcgtcgccggaaacccggataaacaagcagtcgccgatgcgttgtgggccgcccataacggcggaactccatgggactatggtgcgacgaacaacggcgtcccggtggacggtccgaatggcgttcctgtgcgcgatccggcgtccggtcgaaagtatgtcgtgaagtggaccactccaattatgtacgatggatatgttaacgtaacagtccagcaaggttcctcctctgtagctccggaagccattcagaacgcagtggtcaattacgcccaggggaaagtggaaggggaagaggggctggtggtgggcgcgagcctgtcggcattcgaagttgccggcgccatcgctcgcgaaattcccggcatctacatcaaactctgccaggtcgcgtgcgtcgcggctggctcgccggctccggctccgggcgatttcacttcggaatacgtcatgagcgcattcggccaggctaccatttccgttggtaacgttcgggtgactttcgtatgactctgcctgcgtacaattcggacatccaacaagctctgaaatggctccataaccaggcgcctggaatcaccggcctgatccagagaaaggcgcaatggtatgacagattcagccgccaattctgggccaactgggagcgcgacgttttccacttgaaaactgccaacccgttcggccttatggtttggtgcatcatcctcggcacgccttcgaaagggttcggcctttatccaaagaacagttcttgggcattcggtcggctacgccagaacttcatttatagcggtacacaagtcccgccaccggcagacgcatcgcctggaggcaacttctacggtggcggcaatgccgaaattctcaacttggacgaaatcaggaaagtgcttcagctaagatatgtagcgctgatttcgaacggctcgattgcatatatcaatcgcatgcttcgttacatattcaatgatgatgagccatgggacgaggcgaccggtctgtacttctatctcatggactcaaccggcgagaatggccctgtggagaacttggcagtatatcggaaagattgggaaggtatggtgttgttgtccagttcgcccagaacgaaccacgtgctgacatcgacccctgccagcgacgccgattggccaggagtcgatccggccgcgagcggtcttccggtaacggtcgaaacggcgtccgctacggccccggacggctccgctacggtgtgcaagcttactaagccggccgggagtaccgcttacgtctccgcgccgatagatgggccgctggggtccggtagcactgtaacgttctcgttcttcgcgaaagccggctccacccgtttcattgcaattcagtcggctgccgatttccccagtcgagccgatgccgttttcgacctggattccgggaacgtgatcagcgatcagatgttggacagcagcgtggtaagcgcccgaatgattcgtctggagaatggctggtggcgttgcgttctcacgaccaagaccgtcagctcttcgttccgcgcggcttacatcgctccggcagaaaccaacttcagctggattgattcgaattccagcgcggcgattgatgtgcttatctggggcactcagatcgaactgggtgatactccaaccggatacttggagactaccggaacgcccgtaaccatcaccgattacgttctgcagagcgcccagaccggaacggtcaagttcacacagcctcttccgaccggagtagaagcgtattggactggagactggaaaggtgggtctgcgaccgagccggccagattcgcagtaggggatgggactcaagatacattcaatctgtccagccctgcatacatcggcctacccactagtggggcgttcaagctagaatacagagttggtccggcgcttaatttgtcgccgcaattgatcaacctcatgaatgaccgggcggtcggcatcatgccgacttgcgccggttgcgatgtaaaagtcattcaggagtaatgacgtgatcacacccgaactgatacccagtccgtttgccgctcagggcgataaagacccgattccacaaacctcctccactggcttcgcaaaccttcgcgacggctatacgccggactacgaaatcagcctggcgtcgaacaacccgcaggccaaagcggtcgagcggaaaattcaaaaccaactcttcttcatcgcgacccagaacgcacaggcgtggcagcgacaaatggcgccgccgtggtttcagggcatgcctggcggctacgaacagaatgcagaagtcgtgcgcgtcggaaatgacggcataatgcggcgttatcgttccatggtgaatgccaatgcgagcgaccctctcagcagcacgacttgggaagaacaacccgcatggtcggcgatgcgctccaacatcccgatgccggccggaggcccaggcctatcttctggcggagaagtcatcacgaccggccgcaacttcaacgacctgttaaatgggacgtgggagttcttctctgattcagtggttatcgcttctcagaatgcccccgtatatccggcttccgctggtgccgctgctggcatgttggaggcgaaatcttgggtgtccggagccaatacgttctgcgtccaacgctacactgatcgcgtcgggaacgtcgctgtgcgcgggcttaatgccggagcgtggaccaactggatgtatgcggtaaacgtcatggcccttcaacaaggtcgggtcacctatggagtcgcggccggatcggcgaacgcttacacgttgacgctagttccgcagctccaaggcggcctggtggatggcatgattcttcgggtcaagttcaacaccatgaacaccggcgcctccaccatcaacgtctccggactcggcgccaaagccatcgtcggcgcggccaacttccctctcaccggcggcgaacttggccaaggactcatcgctgagcttgtcttcgacgcagcaggcgaccgctggagaatcctcgcaggcgcgccacgcatccaagttggcaacgccgatcaagattaccaggtccccagctggaaacaggtgaaggattacgtcgcgtcccaaaagctgactgaagtggactgggctgacgtcgtcaacaagccgaacgtcgctatccaagacactacgccgtggttcgccaatctggagttgtctgacgctcggcctttcatcgatttccacttcaacaacaaccgcgccaaagacttcgactatcgctttatctctgaagctgatgggtcgatggcgttctactctcgccaggggtcagctggtcctacccaggatatcctgttcagcaggtcgaatgttacattcctccagccgcgactggatgttgcgaaaaacctcgcgtacatcgcgaactctggtcccctttggcagaacacaactgccgatcagcctggttggaaattcaccttcgcacaaggtgtggacgccaacaacaacgcggttatcgcagtcaataccaccaatccggacggctcctatcgctcacagatcatgcgatgggactgggcgtccacgaacgtcatattcaacaatcgtccgctctttgccggtcaatacactccttgggattctggaaactttaatccgaacaccaagttgactgtgaatgtcacgaaccaaatcgccggcccgaccgggattcggaatacaaacggcaacaccggcaacatgaacacatggggctccagttccacgacggcttcatacggaaacgctgctcttcaaatcttcgggaaaggtggtggcgagcctgccgcgctttatttcgacaactcccagacaggatggtatctggggatggacaaggatggacagctcaagcgggccggctggtcgctcggcaataacgcctacgtgattaccgacgaatccaacattcgtttccacgtgaattccatggctggcactcctgtttggggcggaaacgaattctgggggccgtggaactttaatccgaacaccaagctgaccatcaaagccggcacccaggaaactagcagcactgcgatattcagcggaactatgccattcgctccaatcgcatcgctgtccgattattctcaggcccctttgacggtttacaacgcgccaaccggtccgtctgcaaaaccggccgtcatcgcgttcattcgtcctggcaactggggcgcgttcttcggcatcgataccgacaacaagctgaaatggggcggcggatcgctcggcaacagttccagggaaatcgccgattccagcaacatcatgaatctttgggcggccaacccgaccgcgccgtcctggaacggccaaaccgtttggcgatccggaaactttgatccggcgacgaaagtggatttgaacgccgcgaacgccaccaacggcaacatgatcttcaaccgcatcgccggaactggtagcggcatagcttcgtccggccgagttggcgccatcaacctgcagaacggggcgcattcggggcaagcggccgcagtcactttcgagcgtggtggaagtatcttcgtcaacttcggcctggataccgacaacgttctcaaagtaggtggcggaaacctgggggcaaatgcctatccggtcatccacgccgggaactacaataactacatcaaccaggcgctggttcaggtcggtctgggcggggtcggttcctatggcattttcgctgttctggataatgcctctccggttgcaactgttcaacccggagtggtcgtggacggttccattctcatctactcgtcttgcgccgcaaactacaatagcggtcgaaggcctgccggaacttggcgctgcatgggatatgtagtcaaccgggatgccaacactcctgactccgcgacccttttccagcgagtgacgtaaaatgaaatggacgcggatcagaaaccctcgttggctggatgaaacaaacatccacgccatggtgactttcgatgggatcggggaagttcctttcaccgccaatccgcacgacgtggaggcccacggaagggccatccacgctgcaatcctatccggggcgcacggacctatcgccccggtcgatgcgaagcgggagcaggccttgcaggacgctatacgggccagggaaaagcgggctatccttcgtgatacccgctggcccatagatcgtcacgacgagcagaggcggctgggtatcgaaaccacggacggacctgggttgatagcagcccttgttcactggaggcagcagattcgcgattggaatagcggggatcggccgcgacttcccatggctttgaaaacaatgttcaaaaatcaggagtactgatgaaaatcacgaaggatgttctgatcaccggaaccggttgcaccacggatcgggcgatcaagtggctggatgatgtacaggcggccatggacaagttccacatcgagtcaccgcgagccatcgcggcctacctcgccaacatcggcgtcgagtccggcggactggtaagtctggtggagaatctcaactacagcgcccaaggattggccaacacctggccgcgccggtacgcagtagacccgcgagtccgcccgtatgtccctaatgctctggcgaaccgacttgcccgtaacccggttgccatcgccaacaacgtgtacgcggatcgtatgggtaatggctgtgagcaggatggcgacggttggaagtatcgcgggcgcggcctgatccagctgaccggaaagtcgaactattcactgttcgccgaagactccggtatggacgttctggagaagccggagctgctggaaactccggccggcgcgtcgatgtcttcggcctggttcttctggcgcaatcgctgcatccccatggcggaatccaacaacttctccatggtcgtgaaaaccatcaacggcgccgcgccgaacgatgcgaaccatggccagctccggatcaaccgttatgtgaagaccatcgccgcgatcaatcaaggctcctgatattcgcccaaaagaaaaggccgcttattcagcggcctttttgctttccggctttgcctcttcaaccatcttgacttcaaccggcgcggcggactcttcctgagtgaccgaatccacatagttccctagtgaactcagaacgccgattaacagcgctcttaccaccttgtccttgactgtctcgcctatgatcttggtcagaacggatattaactcttcccggagtctggggctgattcttggccgaaagcgcttgcgatgctctttgcgtttcatgtttagtcctctgtctgcggtcttctcctcaccccgataatggcttggggatgcgctgtgttaatcggaaggttcgggcgctattataactcgtcgaaaatgctcgcgcttaactgtttaacgatacgcaccgcgatattaaatcgccttctttctggccaaggaactctggcggccgggtccggtctaaggcctaatttgtcgacattaaaacgagaaaacccggatcgcctgtagggcaaggcgtccgggtttatttctatctagtgtacgctaggatcagtgacttccgccccacccgtccagccagcaatcgaagacggcgtgcctcggcttgtccttggcgccatgggagaagtgcttgaaccggatgacctggcccttgagatactccctgtcattccagcggcgctgtttctcgtcgtgggtcaggctggaggccgacacgttgaaggtgactccaggccacagacgttcgttgcggcagacgaacgcaccgaccattccggacggcgacaggttttctgcgtggctggagcgggccgtgtggccaagttcattgatgaaagcttcattgttgttgtgcatcaactcttccacgtcgatgatctcagcttcatcgtagtcgtatcgcttgactttcacacagtgcccttccttggcagtcgagcgaccgaacttgtacagtccatcagcgcgcttgcccatggaaccttcgaatcccagcattgtgtggcggcgctcgacttcgctgaactgttcgatggaagtcaccagttcctgctcgaccaggtgaatcctctcatagccgaggcagtgacgaaggaagttcacgcgctcggccgccctggctaggcgatcttcggtcggtgcgcgaggatcggtgaaatcatcgaacacatggaaagaccagtccggctcaccgctgtggcggcgaagatcgccggacgacttctggaaaactttcgggtcgctgatgtcgccgcagaccagctcgccgtccaggccgttgaacagtttatcgctgaggtattcgtagatcgattgattgttctgccgcttgagttgacgagtcagcgcctcgccttcgaatacgaagcagcgaaatccatcgatcttcggcgagaaatacatcggcagttggccttccagcagcttcgggtcaaaattcgatgcgagcatgggtttcatacagttctccagaaaagaagcccggcgaaccgggctaaatggcggtaagccggctcagatggtttcgttggcatagttcagttcggccatgatcgacgcatagcgctcgtccgactccttaatgaaaacgccgtcgtacatgacgcctttgcgatccttgatggtgtcgtaggctgcagcgtagcagtcgagcatggtggtgtcgtgctcttccgtcacgtcgaacagagtcatggcggccgataccaggctcttgatggccaacccatgatttccacgtgccagagcgcctgccagatcgccgaggcgctgcaaatcgtcgccgtaggtgggatgtacttcgccgctctcgatgaaggccgacagatgatcgaacagattttcgccgagttgcgcggccatgatcgtggcaaccaccattacgtcgccgatgccatctttcacatcgaccgggttgttctgaacccaggcttcgcatacttctgcgaactcttcgaccaacttcaggaattgatctttcgcagacgagcctttgatcaggttacggtcggaagcccatttaaccaccaggtcgtgaagttcgcggctcatgatttgttcgatgttcattctttcgattccttctgtatttgggatttgactgcattgatgatggacgccgtgctctggcgcgatccatccttggtggtaccgaagtagaaggccattaccgacttcagctcggcgaaccaatagccgatgatggtgccgatggcgaccgaggatgtcgggtccatcagagcctcgcggccgaatgtgaagattgcgatgatgatgagaatggagcctgtcagaagagcgaatgtaatcgccgggcgaacgaaatcgttctgctgcgcagcaagcctcctcgccgaatccctgtctgccgcctctgcggcgaactggctaagctcggcctggagctggttctgctcagactgaaggcgattttgttcggcttgaatcgcaagctcctggagacgaacgcgctcggcgctctggagttcggcgagacgcgctagagcttccggattcgcgtctagagcgctagcgaccgaggctgggtcggccttcgaccccagcgccgtcgcgacgatagcgccaacggcggcgcctgcaggcccacccaggagcgaccccagagccggggcagccgcgccgatcttactacctatgtctttccagtccatttcgactcctcaaaagaaaggcgccattacagcgcctttctccggccggtgatttagaactcttcggcttcggtcgcatcgccgacgccaccggcgtcactgcgaggctgttcctgcttgctgtagtccaccttcacctcgccgcctacgaacgacttgtacaggtcggccgcagccttgaagtgatccgggttcttcaccaggccttccagctcgaactggacgccggaccagctgcccttgtcgttcgacatgcctacggtggtcatacggaccaggttggcgaaagtcggcggggtgcgcaggccctgcggggtctgaacctttttctgggacagcgcggtcatgagcttcttcgaggccttgatctgcgaagacgacagggagatcagagcctggccgaaatcgccggtgtccggatcgatgacgatgacgtaatgaccacgggtgtcggcgaagtagtcagacttcttgtcgctgaccgaaccgtcttcgttcggcgcgtacaggcgtccttcgacttccttcaccttggccgggtctttcatcatttccttgaagtcttcgacgctgatggcacccttgaaaccgccctcggcctcgcgaccggcccagcggatgaactcgcggcggtacgcggccggaatgatcagcaggccggtcttgccgtcgtaaaccttgccggtgacggtgttcaggaacatgccggccttcgcgccttcgatgtacttcgggtcatcttcatcgacctggggagacatcttctgcaaaacctggatgaaggggatggcataggactcggcatcggcgccttcgaagcctgcgccgtcatacgatcccaaatccatgaagtcgggaacttctgtagtcgcgacggcgccgccaccggtggcaattgctacggccttggtttcttcggttgcttcggaagtttcggttttcttaccagccatgttaggctccttgtttgtcgaatttcagttatcgctaactgtgggtttataataacggaagttgcaactaagtaaagcaaattacatatcaagatttgctctttttcaccttcggtttcgtgatcttggcctctttgtattcgtgtacgccgatgaaatctggcagctcttcgcccttctccaggtactcgcgaccgaacgcctggagggtctggtaatggacatcgcggttgatggtggcgtcatagccggcttcgatgatggcctcggccgccttcttcgcatcttccatttcgccgcgaccgaattcggccagaaccttggtcttgatgatgccgtcgttgtcggtgtcttccagccacttccagaacttcgatttgttctcttccttgacggaaatgatggccttcggctctacttttacagtgcgaccgtccgccagagtagtggtcttctgaccaagctcctccaacagctccggaatggtgttacgcttgagggtcttcagctcctcttccttttcggccagcgccttttgaagatcgaggatttcgccgtccagctgcgaagccttgtccaccaagttcagcagtcgatggccgatgtcggtggcttccaccgccatttcatccatgacgccaaaatagtcgatttcgcccggcgcgttctctttcaagtattccgggatttcaagctcttgctctttcatgtccgcctccaacttagtgatgttcccttacttgaaccaagtattgagtagatattatgccgcatcttccttgatacggctactgatttacatattaaatttcgtcgcgagtgctaacgtcagcctcaaacacgccatcaacgacataacttgccaggttgcgtttccactccaagctgacctggattttctcgtcgatggaatccagacagatcaggtcgaagtacagaaccgagttgacggtgccgattcgatgatttcggtcttcggactgcatccgcagctcgttgtcttcgtcggtcgtgtagtagatggccacgtctgcggctgtgagcgtgatcccgatccctgctgcggccgggttgcccaggaacacctggacgcgcttggcctggaaatcgtcgatcaatttttcccgctcggcctctttggtctcgccgtagtaggtgccaaacgaaatcccttgggcctccaaatacgccttgatctggtcgatttcctgaatgcgcatggcccagacgatgatggaacgctccgggtcttcctccagcagaccctccagaagatcagtaaacacggcgaatcgcgggttgtcttcgggcggcaggatcaccggctcaccatagacgttgatatagccggacgccacttgcttgagcttcgagcgcgctgccgcagcatcgaaagatacatccagcatgaaatcttcgttctggagaacgaagtgatagtcttcttccacgcgctgataaacctttcgttgctccggcgacatttcgaagtatatgcgcttgtacaccttgtccggcaggaatggcaatgcttccttcttcgtgacccggaagctgtgcggctcgatcagggatcgcagcttgtccaggttccggaataccgggcgcccataatcgtctttttcgacgagttgcggcggcatggtttgcttcccttccagcttgcgcatgatagcgatcattcgaggatcgtcactgggcaccaagacggaaaattcggccacaaacgcccgataggatttagtccccagaattccattccgcaagaattggaactgcatgaacaaatcggtcggcgcccgcgtcagaggagttccggaaaggatgcgacgggccacggccttctcgcccagctttacgatctttttcgcacgcttggcttgtgggtttttgatcctcgttgactcgtccacaattgcgcaaactttgaatgtatcaaggaatcgctcgacctcatcatagccagcctggtggttgattgcgtcaacgttgatggcgaagacgcgaagaactttttcatctgcgaacgtctcggaatacagacggtccaagcgcgccctggcctttttggaagtcggtcggccgcgccaatccacgctcaaagtcttgatcgcgacgtgggtgggaatctcgcgcagaatccagttggtgtggacgcctttgggggcgacgatgagcagcgcgtccacgcgcccctgtaggaagaggcgaacggcatcggccaaagtcgtccaagtcttcccggtgccctgctccatcaggtatgcgaagttccgtttgttcagggacgctgccagggcattgaattggtgctgcatggcctcggtcttcatgcccttgacgggatatgttttggctttcatttgttctccaaatcggcgaggaactgaacaatgttatccagtccttctgcatagctcgcaacttccaccaagtcgcggctgttaagctcgaacaaatcgaacataggattcagcagcagccaatcggttccgatcttggccaggacgaagccccggccaccccagccgatccgctcccgaagaaaagggatttgcccaggttcgaaacatctggccattgggcaggtggaagcgcgtttcggccactcctccaaagccttgaactcgacccagaactggacacctcgacgattcaggcagatcgaatcggacatgccagaccgccgcgtctccagaaagtcgatcaggattcggccgagcgagcgctgcttaaacgcattcgccgctttcgtttcgcgatcattcatcaccttcgccctctttggaaactttctctgcttgtgctgccaactttgacttctcgcgctcggtcaatatccgcttgacggccttcacgatgaacatgtcgatgccgctgagcctccatcctttgatcaggaaccaagcgccggtcggcgtcccttcagcaatctgctttccgtattgcagatatttttcaggccgaattctgaaacgtatcggctgatcaaccgagtcatcaacgcacatgatgtcgagaaactgcgactggcccttgtacaccgggtttttcccttgatcagccctcttcttctggcgaatcggttcgttctcatcagacagaacttttttcaccatcttgacaatgaccagaccatcatctccatcgcggatatcccgaatgttctgaatggggtttccggaagttactccaaccagctccggattgtcataagcatgaccccagagcgtgtgagcttcgttcaaatctgcgaattgaacttcagaattcgacagactcgcggcgactttctcccaatcctgaagcgtcttcaggtgggtgcctgccagctctttatattgagccttcagctccttaagatcggccttcaactccttcagatcggccttcaacagtttctccagttctttgtcttggctgattttcgccgaaagaatctgggcttccagagctgctacatcagcagccttgtcctcaacatcctgtgccgatatcgggcaattggccagggcgatcctcgcggccttgacttcctcacgaagacgcaggaaccgctcggccttcgccgggccgaagcctttggcgttcatgatgccgccgatcaggcgcccgtccgccaccacccagttgagttcggaatgctccgggtccagggccgtatattctacgccttctttggccaattcgcgaaggatagacacagtttgctggtcgtccttcgccgcccgaaggcacgcggccgcgtattccaggcgatgataccgcttcatgtagcaagtccagtatgtcaccacggcatagcttaccgagtgggagcggttgaatccccaggcgccgaatgtcaccatttcctgccaaactcggtgagcgtcttccggggcgacgcctatggtcttggcgccctcgatgaacaattcccggcgcttgttgaaaaattcttcgccctttcgcgccgacatcgctttccggatcgccgacgtttgttcccagtcgaactgaccaatgtccttaacaattgacatgatctgttcttggtacaggaacacgccatacgtccccgacaaatactgctcgacctgcggaatggtataggtcacaggctcgcggccggccacgcgctcgatatacttggttgccataccagaagacaacggacccggacgggcgagcgccgtgatgtggtcgatgttctcgaacgcggtgatgttgatcgcgtttgctaccgagcgaacggcctgcccttcgaactggaagatgccggacattttgtcttcattgagaatgtccagaaccgccttgtcgttcaaaggcaagtcgtacaactcttgcgcggtcacgcagttcgcgtcctggatgactcccaaagttcgaaggccgagcgcatcaattttgagaagattcagatattccgaatcgggcttgtcgagctgcgcgacgccttcagaagttaccgtacagaagttgatgacttcatcgttgcagaccaggatgcctgccgcgtggacgccagagtgggatgggtgaatttcgaggtcgcccatgcaggcggacgcgatctcatacttttcgcggaagtcgcggccgggctgagttttttcgaaagtgtcctccaatccttttccatatcgttcgtccgccgatgtatattcgatgatcgagtttttgatgttgtcggtgtcgtggaatggaatgccgaagcgttttccgacgtgagcgataaccgacgcggccttgagtgtgttgatgttacccaacttcacaacgttccaagtgccatacttctgctggagatattcgaacactagatagcgatgggtatcggcgaagtcgatatctatatcgggaagatcggaccgggaaatgtcgataaagcgctgaaagaggaggcgatgcgggagcgggtcaacctctgtaatgccaaggagatagcagaccaaagagccggccgaagagccgcgagctggaccgaccagcatgtgcttcttggcaaacgcgaccagatctgccacgaccaggaagtagctgtcgaaatctttcagctgaatctgcttgatctcttcttggaatcgatcctcatactcctgggtccattccttgatgtggccgcgactgaggcggtaggcttgcccctcgcgagccagagcgacgatatcaccatccaagtggatcatcggcgccttcgccagtttcacatccgccaaccgctcgactaccgcacgagtattggctgcggcagtatcgaactcttcgcgagtcatgatgtggcgtaaacggctccacagctcctcttcggtggcgatgtggcgaaggccgaccgattcccgcaccttccaggccgacgcgaaatcagcatggtcgatggatggcatgtcgttgtaagaggtaattaccaccggctttccgaatgccctggccgtctccatagcgccgtgcgcggcgaccatcgacgcgggattgatgtcaatgtagtcgattccggccagatccagatgggcataggcctcgccagcgaatttgatgacgccgtcagcttcctggaattcttgcggagtcaatccttgattctggaccgacttggaagtcaagcggtagaacttcttggtgtccttggcgagcacccaggctttgagcttcagctctttctcgccatcgtcggcgcatttgatcgggatttccatgccgaatccgcgaggcagttctgccttggcagcggcttgttcccaacggacgtggccccatgttccatcatcgacgatggcgacgaatggggattcgatctctttggcgcgctcgatgatctccgggaatcgaccatatgcggcgccgtaggagtaaccagagcgaacgcggagctgagggaaagacatcatgcggcctccattgcttgatacgcccgatacactcccatgcgcttgcagacttcgtggagcagccgcacgtcgtcgagcgcccggtgtttctgtacatatgggccgcagtagtgctcataaagatgttgcaaccgcatgcggtggccgaacaacggcgccgactcttccacagtacagatatcgagtgatgggaaattgacttcttccaggccgagctttccgcgagccaaatcgcaggtaagcatgaacttatcgaatggcaggttgtgggcaatattcgcgtcggctctggaaaagaagtcgcgaactttctggcgctgatcgaggaaagatgggtgcttgaccaggtcttcgttcttcaacccggtgatcttggtgatgatttcctcgataacgattccaggattgcagatgaactctacttcatccaaaatcttttcgccatcagttatcacgccggcgaattcgatgattctcggctgctttctcagactcaccctttggtggaacgggagccctgtggtctcagtatcccatacagcgaatatcatgtttgttccctcttatgtcgaaaggccggctgctttcgcgaccggcctgaggagtataccgcgacggctgaagatttacgccttctgtccgtctttcggcgtgatgcggccggagcgcatggtggcgtgaacaaacgccgaatagttgatcgagtccaaggccgaatcggcatccttgaacccgctattcgccaggcgagtgagtttacccaccatgtgcatcacgaacatggcgagtcgatgatcatcggcggtcttcgccaccaggccgttcgggaagaggatttccatgatctttccgtacatcaggtcattgcgaccataggtgctctggcgggcgcggaagacttctgctgcggcgtacagattgttgagaacatcttccgcgaaatcatctggatgggaatcatcttcgcccggccagacggattccatggcgaacggcgcggcgtcttcggtcgggttttcggactgagccgtttcagcgagcggagacggggctttcgcaaacgcctcgtcgagggtaggggcggagttcggggcggccgggaacggctcgcctgcaatgtcgttgggcgcgctatcggggtcgctatcggccgcgacggcgaagaacggcgcatcgcaaccttccaggttcaggatgtaggagtcgatccccaggctattgtaggcatcgatgatgtcctggcgatcatcgaacgccgcgacgatcttggtgacgccttcgattttcttcaggatgtcgagcgcgactgcccgcttgaactgaggcgccggctcggtgttaccatacggccgcatgatgagttcatactcgcgatgttcggcgatgccgagttcgcggtggagcttggccctggtctggaaaaagtggttgtcggttcggccggtgacgaagaaaatcatgaggtcggcgtcgatggcattcctgatgcgacctacagcgtgcgggttgagagtgtccttgtcgagacgagaatgatactcgtcccattgccgttccaaggcgaagctcttgcggtggctatcgtcgaatacgcagccgtccaggtcgaagatgatgatgccattcttgggtttgcgttccatattcagatttccttgatggttgctttctgggtgacggttttatcgatgaacgtcccatcagaagtgagtcggaaaacttcgcagttctgagtgaaatcgaacgattgcacgttcatcgtgatgcgaatggattcgctgccgttggtcacttcgacttgtgcgatgtcgccaactttctcgacaatgatcttcatgttacatggacttcccgttgacggccacagggttggcctcttgtttttccgatccccagaaatcgcggcgcagttcttcctgctcggccgagcgatccatccaggggcgatagaacttgcactggtagataggttccaacggaacatcaaccacaggaatctggccgggcttcgtctccagagcggccatgaaccggtcataggatttctgctggatttcctcttcattcatcaccttcgacccatagcgcgggaaggcgcaggagccggtggcgacgcagtgcggctggagtaggctgtcgaacatcggatagacttccagaaccagccggcgcatctcgcggaacacttcctggtattcgccctgggtccgaacgcacaggcgaaccttcgccatgtcgctgagagtccgcagattgaacttggccgcgatcttcgtttccatgttggaagggatgatggcacgagcgtcctggagcgacgcgccggcctccagcagcttctggtagctggtttgcgcgtcggcaatggcgtcatgccacagacggttcagctcttcgcggacatggtaggtcgggtcaggctcgccatttaccgtagccggttcgtcgaattcccagcggaaagcttctggctgaacgacggcgctgatttccagagcgcgactggtttcctgctggtaagccccggtccgcgtccgaacgagttgatgggtgaagttcttgctcacgccctcgatctggaaaatgaagtctacgaactcgaacggcgagcggatggtgtccagcatgtacttccagtggtcgagcttttcggcctcggtcatggtcgccgggtcttggccgcgcatgcgggtggacttcgtgcccaagagcaattcccaggcgttctgggtgtaactaatcagagaaatcttcatcagaaatcttccggaattggcgtgaagtggaatttttcggtgagagccagggccaggccttgggcttgctccctgttaaggccatactgctctatctcttccttgagcagttcgcaggcctccaggcgcgcctcatactcttcagcctcatggacggatgagaagacggctccatcagaggttcggtacacaagttcgatcgccatggtgacctcagtagcagcggatgatttcggcgcggatatctcgacggtcgaggtagtgctcacgaatcttatcgcgggcgcgctcggcctcttcgcggctgccgaatgacaggttgaacgacgtgaaaggcttatcgtccagttcagcgccggtctgatacaggatgcctaccagaacgaaagacggcgcggtcttcggctgctggtcggcttgcatttcgaggaaggacataggaacctcttcagaatgatctggtgcgtaaattaatagcgctcctgctgagcagctacggtttccggctcgtagatgagcatgtcaacgatttccgggcactggcctttcacccagtcgatggccgcgaccagtgtggtggaagcggagaaagagaaagtgcggtaagactcatggatgtacggcgaccccatggaatcgcgctcggtcgtgcgcgaaatgactgctttgatattaacgatccggcccatcttcggcctccactttagcgattatatcggacaggcttaacttctcgccattcaggaaataactggcgcgaaacttcctgtcgccctctggcccgacgattcgggccgttatggtgagactcccgccgccaagggcatcggtgtcccggaagaaagctagcagcgcccgcttgagcgctgcttcgcgaggatcgacggccattaacctaccacgttccagccgtgctgagcgcaccacacggcaccggcccctgcaggaagactattcagaaggaacacaggagtcaggcggccgtcctcggtcatatggatgaagtagcgggcgccttcaccgagccattcggccttggcgatagcgcgttcgagattggccttggtggcgtaggttttggtgtggttcttgtcggtggagaaggttacttcgcgggccatttgtcgattccttttggttgaagggtttcgcgtttcgatgagggaatattacgcccacctgatccagaagtaaagcacttttgtaaattacttcacgaacatcttcttggccttctgataagacgaagaagtcatcaggcgctcgatgacgtccatgtcagaaaccagatcatccagaaggacattgcgccaggtagcgaaccggccgagcgagaagatgccagcctcatgggtgagattccagatcatggattcgcgctcgtcgcgaccgagcggaatgattttgcctttggtctggatggtcggctcgccatcttcgatgagatgccttttcctgatgccgaaggccgcgcaaacgtaatccatatcccagtcgctgtcccattcgatggtttcgattttaccatctaaagtctccactatccccttagtgatggattcgacgatcagagtatcaccggtgatggacgctcgaaacgttcccactttaggaccagggaaatacacggtctggaagacatcacaggggatggaaagcttgtatcgactcacgatgatggaggttccttcaccgaatgacgggtcgattcccaggtccagccctgccgcagccagattggcgcggaacggcgcggtgctgatgatattcacgtggtcatcttgccggcgaagatactggaagaaagaggcgtcgaaaggacggctccaagtgatacgattcgcaagcttagccaccagctgctcatagtagtcggccggtgcgatccaacgcttttcagtcgccagattccagatggaccggtccgacaggccgcccgttactttcctggagtacatgttgcagtggtcgatgcgcggctgggaaatgaactcgccgtcgatgtagatagctttgtgtacagtgacttcgcggaacgggatgccggtgagttggccaatcactggcgagcggaatcgcagaagtgcgttgtggcgctccttattctccggcgtcgccgcgtcgatgatttgggcttgaggaaagcgatgcgcggcgatcagtccggcgagtccggcgcccacgatgataactttctgatcaggaatcatgatgtgtcccttatgagtgtacaaaacttgagaggataaaaaagggacccattctcatgagtcccttgaagagctagacgattcaggctcagaagagcggcggcttactcttcatcaccttcggaaccatcggcgccctgatcttcaccgtcgtgctcctggccttcgtcatcggccttctcgtcatcgccctggccagcttcgtcttccttcgaagcgatggcaaccagatcgacccagcccatgatttccagcttgctcaggtagctgcggaccgaagtgccatagagcagatgggccaccttctcgccgaaggcttcgatttcgaccggctcaccaacggtgcagtgctcgttgatgtaagcgaacaccttgccgcgagtcgagaaggcctgcggagtgccatggccgtcgccggtcgggatgaagtgggtggcgcgggggcgacgcgagccattggacttcaggtcttcgcggcgggcttcggccttcttacggcgctcttcctgctcttccttgcggcgctgcttctcggcttcgcgctcggccttcttctgctcggccaggcgcttgcgctcttcttcgcgagcgactttctgggcttcctgggcggccttcttctcttcggcctttttggcgcgctcggcttccttctcggccttcttctgctcgcgctcggcttccttggccttcgccttctcggcctgctcggcttccttcaacttggccttttcagcacgctcggcttccttggcggcggccttttccttcgccttttcagcacgctcggcttccttcttctcacgctcggccttgcgcttctcttcgcgctcggctttcttctgctcgcgctcggcttccttggccttcgccttctcggcgcgctcgcgctctttacgttgacgctcagcggccttctctgccttgcgcagggcggctgcttgttccttggtcagctcttcgccttgggcctggtcgttctggtctttctgttccatgttcttactccgggaatgtttaaagggatggcttattggcctgtgaggggattatctctaaactaattgaagaagggaataccttagcctgaactttcctaaatattttctttcgggaaaatccagactccagggaacttatttatgttcgcgaagtttcaactcttccgcaaaaacagcaagtattcaactgcacgagttatgccggtatacatcaactgactataaggaattgacggcaagttttcttccagcattgccacacgcttccattccgatccctgcgacttatggaacgtcatcgcccaaccgaagtcgaatccgccaatggccttctgcgcctccagccgcacatcttcctcggccgaaaagctcaaaggattgaacttcacccatcgctcatagttcgttccgataatgcgaactttggcgaacaacatttcatccggctcgtcatcatcttcttggccttcggggaccggcttgaagtccagcagaattgcttgctcgccgttcatgatgccatattcgtgctggttcccggtgcacaccagcttctcgccgatttccggttgtacacccttgtagccgaggatgcggcgcgccctggcgttcaaacggcgacgagtattgttgtaggcgcaaaggatcacgccgtcatcgtccaagaacgtccgcatttcgtcgtccgacatgtcgaatccggcccgtaccagaatgtcgtcatactcgcggcagggcaggcgcttgccctggcggacgaacatcgacgcccgaacgatattgccggcgttgcgctcgatttcggtcatgatggtgtcacagctgttctcatggaaaatctggacgccgcgcacaggaggaacttggccaaagtcgccaatttccagaaccggaattcggtgcgacagcaagcgctcttcatcccactcgccgatcatggacgactcgtcgagcacgaccaacttcggcttctcgtcgagcgagtctttgttggcaaacatgatttcgccgtcttcatcttcgccaatcggccgatagatgaagctgtggagggtccgggcattggtgcagcccttctcgcgaagccgcgctgctgctttcccggttggcgcgacgaagaccgtccagtccatcgagcagcaaagttcggcgatgatcttcgcgatggaagtcttaccagttccggcgaaaccagcgagtcgatagacctggcggcggtgcgctcgatcacaccaaccgcgataccagtccacaacggaattgatcgcgtcgatctgctgactgtttggtcgaaagccgaatcgctcttcgatctgatcgacggtgaagttagatgctgacatatttgcgttctccaacgctaggtttaattgaatcgaggctcagtttaagcacgccgtccacagaccagccagtatcacgacgatacttgcggccttgcgggtcgacatagaagttcttcgtgcgccgcagcagaacataatgccaagcagctccaagcgcgtggacccttcctttatacgggaaagccttcgcctgctctgcggcctctttggccccagggagccagcggacggtagaaaggaccaggaccgcacccttaatagcctgggaagcggcgcggccgtcctgtgggctatagcgatgtctatcgaagtctacccagtggcggttgccgcgccggagcttgaccgttcgggatcgcccctcgaacaccaccgtgccttcgtgagtaaaaatatgttccgccatcgaatgttcctttataacgtacagttatgctttacctctgcgcaggaagagtatactatcagctgactcgccaaagcgagcgaatttaatccaactttacttcggcaggaaagtggccgatactagcgccgccgcctgtactgccctccaaaacagaggatacattaaatgcaagaatgcaagatttcccgcgaccaactcccggtcggtaatccgaatcccaatgtcgacaagacccgcgacccgaacctgaagcccggtttcctgcgtcgcagccgcgagctggacccggcgctggccgttcgcattcgtcgcgagctgatccacgccgaagcgtccgatctggccaaggccggatgggtcaattcacagtccagcctttatggatcgaaagccttcccgcgccattccgtcgttcgcgtgaccggagttccggaagatggagctttcatcggcatgctgatcggcttcatcgagcatcgcgagcatggcgaatgggcggtcatggaagccggaacgaaagaaggcggcgccgtcattattccagtcgatcacatcatgcgagcgtcattcgccgaagccgaagagttcgccgaaaagtgggagcggaacttggggtggcgtctcctgcgccaactccgcgagtgcggcgccctggccgggactgaagacgagttcctgcggcggatcatcaatcgatacgttcgtgatcgcacgatcctcgatcaccacaaagtcggcgcggacaaaacctatactgatgcagtactcaaaagcatcggcgaaacatggccgaagattccttcggggaaattcgtcggacaccgagtcgcgcagctcctgatcggccacaagctaggtcgagcggggaccattctgaatgacctggtggacttcctggagaagttcgcggccgggcgcgataaagttctcaacatcgccatctgtaattgaggtgaagggatgaacaataaaccgacgctgaatcaccaccatcaaactgcattgttgtatctgtataacaatccaaatcagccggccttcacaggtcccaacaatcaggcgctcaatgaacttcggcagatggggtatgtaaaggcgaaagaattcgaaaactgggcaggcaccggccatcttaggatggaatggacgctcaccaaagccgggattgagcgcgtcgaagtcgggcttctggggaagtgcgacgcttgcaagggaatcggtcagactttgcttcgggggaagtgtactgtttgcaatggccgcggccaggggtggatcagcgaatggtcgcagaagccaatcgaagataatcctcaaattacccctaagttcgaaaagaccgatgcgaataggcttgcagacgccattgaagaaatcggccggctggaaaaggcactggccgaatccgaaaagcgcgggagcgagctggccgcgagctattgtgacggcgtagtcggcgatgaatacggccatccttattgtcgttataaagtggaacgcgacgccgccttggccgaagtcgagcgcctgcgagaatcaaaaggcgatccctctggcagcttcgacaggtgtatgaagatgatgtacgagcgcgacgagaatgcaaaacgactcgacgccgccttggccagggtcgcggagctggaagggaagttgacggactggttgcacgaagggttccggctcaacgaggcgctagcggtcgccaaggctcaacccagcgtgccggaaatatctggcatcggtcgcgatgccgaacatcccagagctgtagtgctgtatctgcgtaacgaacccagcgatgaagatatgcgagcaatacagaactttttgcgcgccatggccgcccccgctcagcacagcgtgccgaaagcatggctcgacgttcaggcagagcgccgccggcaggtcgaggcccaggcgctaaggcaggaagtcgcagcactgcgcgcaagggcggatgttttgccggaggtgttcgggcttgagcggtaccgcgtagaaaaaactgggaagggtttctggccatactgcgtgcgtgcgggggatggaacgcgtgaactgttcgtcggccacttgaagcagtgtcagcgggtagcgaccgaattggctacggcgtttgaagatgggaagtttatcgccgcgcccggcagctcggctcagcacagcgtgccggaggggtggaagctcgtaccgatggacccgacatcgcagatgacctatgtcggtcagtccctgcgttatgacgcggtaaacagcatcggcgagatttaccggcaaatgctcgccgtagctccctcacccatcgatccggccgcgcatcctcagccgtgccagcaaccacaggcccatcctgcccgctgcgggtgcgagcggtaagtgccaagtaaggaattcatgtaatggaacagaagaaaccttcaccagtagatggagtcatcgccatgaccagcctcgacgttctccggaaagcacagcccgaagcccaggacgagtatgccgtgtccatgttcgcaacggcgatccgccagaaaatgcagcgctcccgcgataaaggccgaggcggctggatcgactgcgacgaagatattctgatcaacggattcgccgaacatgcgctgaagggaaatgagaacaacctcttggacctggcgacattcctgatgttcatgtgggtgcgcggcatcgacgatgcgaagattcccccggcgctcgaaaaggcgcggcagcacaagatcatggaagcatggagtcgggtccacgaagatggactaaactccgccagaaaggcgagtgctgcgcgacagttcgtggaagtgcctcgacgcaaggggcgcccggagcgacttgcatgaagcctcacgaaataagactggcacaggccgaagagttcctgcgcgaactcggccgagggattccggacgacgaacgggtaatggttggctacgctgaagaggccacagtccaaaccgacgagaacggccgcaagctcaacgccggctggtggcctgtgccctggaaggaagggaaatacataaactcccgatccaacgcctacgcttgcatctcgtcatccatcaagacgcccaacccgaagaccggccagatgcgatactggcgcggcgaagcctctttcggccacggcctggcgttgatggtcgatgacatcggctccggcaaagggtccaaaggcgacttcgaccgcgacgaattccgcgagcgactggagccgaccgcgattgtggagacttcgccgaacaactaccagttctggtatttcttcaaagagcctatgtcacacatgctccagttcaaggcgctgctctattcgttcgtggaccaggtgctaaagaaaggcggcgacaacaccgtcaaggacgtcagccgttacggccggatgccattcggcttcaacaacaagcgcgggaaagacggcaagttcaaatatgccgacgaaaacggcaaacccgaactcgtgcgcctgtacagcgccgactattccaagcgctactcgccagaggagatcgcccaggcctttggcgtccgcatcatcatgccacagatgaagaaggtggagataaaccgcgacgattgggtgtatgaccaagtatggctgaagtatgccgagcacatctgcacgaaatacaagatgggcgaggcggcaggcggccaggtccagcagaatatgtccggcaaataccgcatccgctgtccctggggcgacgagcacaccaacggcgatcctttcggcgcatactttcgcggaccgatacctggcgccgagcacgaatatgtgttcggttgcgggcacgatacttgccgcaaagagcatcgacggacgtgggcggccttcactgatgaagtcgtcctgccgtatattgtcgaacaacttgaacgcatcaaccgccgtcatatcggcgaggagtagtaactatgcaaaatgatcctggaattctgatcacagccattggcttgctgttcctcggccttatcatcttcttcgaaggcctaaagggatggaaaatacaagtcgcaaacttcctcgcgtcgcttctgtgcttcttcttcggcctttctgctttgacgttctggttcgtcgttgcgtttgacgtattttaatcgacgaacggtacagaaattttcggatggggacggaacttattagctctgccggtttaggtaggagataatagccgtccctttcgcctcaatatgtagaggcagtgttatatccgatcatgtaaagcagaaggcggcaaacctaacatgattatcgacgacgataacattcttgatgatgacgaatcggggtccggtgagttcgatctcacgcaaatagaagatgctggaatggaccctttgatgaccgccgcaagtaaagcggccgatgatgcgattgcgaggaatgaaacgcaccgcgcacaaaaggcggcaagatacgccgaggcgtatgcggaaccagacttgagaaagcgagcgcgattgttgatgctcgaccaggcgttcgatcttccggtcagccgggtggtgaaaggtccgttcgatgacttcatcactaaatacagctcaacttccgacagcaactatctcgcggtctatgatacgttgttctgtaagggcgacggaaccgtcccgcatccgcacttcgatgagtttcgcggccggctggtggaccaccgaggcgtggcgttcaacaacaagaccctcgaccccattgacctgatgggcgccctcgcggctgcggccttggacgatccatcgattaagaagacgattgagacttgctgcgtttgggcgcgtcgatatcgccgcaactctttgatcgagacgtttgagaagaagataccggattgggacggcgaagagcgaattagcacgttgctgatcgatcttttcaagccgttcgacaccgagctcaaccgtatggtgagcaagtatttctggctgagcctgtactgccgcatcaactatccgggaatttcggcgccgatctcgttggcgttgattggtgggcaggatgcggggaaatcatatttcggcttgctgatctgtaaggaactgtccggtgggcgcgatctggctccagttcagctcgacctgagccgacacgaccagacgccgttcctgcgcaacatcaccggcaactcggttattgcgaacgtcggggaaatgtccggcttcaaaaagggcgacatggaacgcatcaaagaattcctggtgcgatcttcggatacattcgatcaaaaattcgagccgggcgaaacgatcaagcgacaatggatcaccatcatggacggcaacggatacgatggactccagcgggacgactccggcaaccgtcgattctatccgatgttcgtggcacaacttcccgacgaagatggaaagccgaactgggttaagccgggcgatggtaatgaaccgttcaaggtggacttcacagacttcggccgcaagttctggcaggctatggctgagtgccgcgcctggatcgaagagcatggcgtcgatggatacctgaatatggtgtcggaagctaaccgcgaagtgcagaacttctctatttcggaaatggagaatgcgcgtggcgtggttcgtgatgatacgattgacatgtatctgatcaacgttctgatgagttgcgagttcgaagaggttaagccgggcaggaattcaaagaatcctggatggagggctgacaccgtcaccattctgaaatggttcgatattctcgccaggaagaagccgatttctcgccacttaactccgcacctgaaggcgctggggttcgtcccgaacaagaacggcctggctggttggtgcctgcccgtcgataaggttgcgcctggatggacgaatagtatgcaaaccacgctgccgccgttcaatgatgcgcttgtgtacttgctgaggaagggcgacccggatatcactgatgaggccgccatggcaaagattcgggcagtccgggccgagcgagccaagattttgggcgaggatttctgatgtagtggttgagtgtacttggactaggccgccttcgggcggtcttttctttggtgcggcgtacattagattccggcgttgggcgggattggtagaagtgaatacagtaatttggaccagtttcgagcgcgaataatggaaagtcgatagattttcggtatcggtttagcgtgtatggtggacggattttgcgtgaaatgttgagaaattgcgtgtttgaggtggacttttcgtgggaaatagccgcaaattactgtatagcgattctgagcggtaatttgggaagcctactgccgcgtgggttagcgggccaatttcctaatttccggtttttcgagcatgggttaaaactattctacagcgaaaatcgattgcac

SEQ ID NO: 72 - protein, 481 aa, synthetic construct
MHPFDQAVVKDPTASYVDVKARRTFLQSGQLDDRLKAALPKEYDCTTEATPNPQQGEMVIPRRYLSGNHGPVNPDYEPVVTLYRDFEKISATLGNLYVATGKPVYATCLLNMLDKWAKADALLNYDPKSQSWYQVEWSAATAAFALSTMMAEPNVDTAQRERVVKWLNRVARHQTSFPGGDTSCCNNHSYWRGQEATIIGVISKDDELFRWGLGRYVQAMGLINEDGSFVHEMTRHEQSLHYQNYAMLPLTMIAETASRQGIDLYAYKENGRDIHSARKFVFAAVKNPDLIKKYASEPQDTRAFKPGRGDLNWIEYQRARFGFADELGFMTVPIFDPRTGGSGTLLAYKPQGAAAQAPVSLEHHHHHHWRRSNQKFRALVGLSEEETMRSVAELIKIGLEDYSVNARDTYMCYILSDLVEEGQITHGEYRSFREWLIEQHGITSWESVISYLHRNCLRDTETNWMNFYVWSYFDLIRKEGK

SEQ ID NO: 73 - DNA, 94871 bp, synthetic construct
  source 1..94871: mol_type = other DNA
gcttacatccgctcccattttgcaatggaaattgcatacagttcatcatgcgcttcaaaagtgacttcactttgcatgcggatgcatgctatagtataccctgtgatagctccgctatcccgttttgcatggcacacgaattgcataagcatgacaagggtaaccctcgaaagcggagctttcaaagtgtaggctgagtgtgggctctacctctattatatttgcgaccggaagtagtgacactgaaaacgttgactctagcccagtaaatacgttaaactaaaaggttgatagctgccgctatcgagtaaccaacattcacacaaggaggcacaatgacaagcaacaatcatgccaagattcacatccattacgctaagcaaatctactacgccatgcgtaaacgtgccatcgcaagcgatgagatatgcaaggaatgggccaagcccaagacaggctttgaagcgttctatgattgggtggtgaatgtgtcagggtacgccgtaggctaccgcctagacaggaatatcctcttcccgggaaacaagctctatgctccgcatacatgtgagttcacacctacatacatgcatactctattcaccaactgcgacaagacaagcaataaccgtgccaacaatgatctacctctaggcgtccgcctagcccgtcatgacaagtacggaatgccagtatacgtctcacagtgcaggacactaggcaagcagtctacccttggatcgttcgacgatccgatgcaagcccatgcggcatggcaacatgccaaggtagcagccatcctcgaatgtattgatctctatcagatggaggatgttcacagtgtaaacgttgttcaagcgttgcttgaaagagtggacaaacttggcaaggatattgcacagggaaaagagacaacccttttgcaatgatttgatggggtcgatggtcaaccctctgagagtgcgagaactccgccagagtaatccgatagcgaagctatcaaacgtatatgcatattccatgccaacatgtggaaagatttcacccggcagggcgggagcccgttggcattagttttgcatagcttagctgtcgctaagaaggaaagaccacggccacccattattttggatttactaagggttagggtagcgaggtgggttcgtggttaagtagctcggaaataaatccataactggcagaaggcgaaccagcagagggcaggcccgctccctccattattttcccagcagtagaggaggcacactctacaaacgtatcactctattcggcgggggtttaggattcgaatatacctttagcggctaaatgccatcattgcttatttcctattttcgtgctataatccttataggatgttcttattcttcattatagctggataagcgatggttgtatagattcaccacaaatagaaggaatatagaatggaagataatattcaagctccgcttgcagctagtgcaggtggcaaattcgcaactgtatacgaagctattgtcgcactcggagtagaaggggctgccgctgtgtacagggtaggtgtagggaatagattgacaacagctagaccatcggcgtggtaaagagaagccccgggcagcgaaagctgatcccggggctttttattgccttgagtttatgtatgaagagattccagttgtctctgctcttccatatactccctagtggcgtagttcatcatgaggttgcaatactcttcgtttatctggtccatgtattgcaacactttctccatgctctggcatggactaaatccattatgacggagaatcttgcttagattaccctcattccagaagtctctggcccaagcctccaaagctactgcgtagaggcttttgatgcacccgataggggatggataccaatattgctcagacattagaccctccaaacgcagcaaacaccccttgcttagctaggatagtctttagctcctccagtgaaatggtctcgtctcctacgaccacatacttgtctgccttccctagagtcatcacacacttagtctggaaggtaggccgatacaagtcatacacatcgggttgccacttgcttcgcaggccagttccgtagctaatgaaccggtcttcgggatgatcccggatgtataggcaccggggactatcatctggcccatctacggagatagggtgttccatccactccctgatcttatcaacgacgccctctcctaccttcaattgagcgtactgacagtactcaaggaacgcatcaaactgttcggcagtgaaattgctgacatcgatctctttagttttcattctcttcctccatgtctgcaatgatttccttcaacgcttgaagcgtgtaggtgccatttagctctgtagtaggaccagtgtcacactcatgaagcgtgtacgcggtcactttcttctcagtgacgaaatggaagtctacccttcggaagtcgtaggtcgatttcgagtatccaatggcctctttgagttcttcctcgtaccacaggaatgtcattggacttccgtcgcttttacgagtgtagtccagcagattatctccaacccacagtagcacttgagccttgtcgtacatgaagccgtttccgctcccaaactcgataccataagccttaaggtgctgttgtactgcaatgttctcttcgggggtcttcacaatagtgtaaaacttcaccaaacgctctttcaatttcagtcctcctgtctgtgttttatgggagtgtaaaacgttcccagtccattgtcaagccttctgtggtgatagtctgttccagacgctctctagctccttttagaatgatatcccactcatctccttcttggacccctacatacttctccatcatcagcgcacgatcaacaagcccagctctgtagttctgtcgctcttttctacgcgatagcactcttgagatatggtccttcttcttcgccaacacgctgatagctttccttgccataagagttgcatactcgctctcctcggcggtcatccattcctgatacagcagccctagacgagtgtcatgctgtacgagtggaaggtctttccatatgatacctactcgtccagtatcagagacggctttccattccagcgtagtgccgccggtcttatagtcggtgatctttacattctccgagttagattgagactggaaagcgtgcctccagtctcggtatacagtccaccgtttccagtcgaagaatgtctcacagatggctttaacaggttctccgattttaccctccagttctttcaggcggttctcctgctcagcactcatgtatttgataggtcgggaggctggatcgtagcactcctctacctgaaactcctcagcccgagactccaacactttaggctcatcgttactttcttcctctcggaaccatgcgaacagcttcttaaacatattcagtcctcctctcctgtgatagctaccctagtcagtctccacacttttctaggtagactaacgaggaatagcatagccataaacggtacggcgataggccagaatattccagctaacaccgctcgggcctctttcttacgcctctccgtactttctcccctccacccaagaaggggtcgtagagattcccatacgaacatccctatcacagagtagaacaataggcagaccactccgacgactatgcatactagaatgagaagccctacttgttccatggtgcgatcctcttaagtagtttacggctgttccagatagacagagcccacttaggtaacaacaccactttcaaaacgctgtatgttgcgtagagtagcagaaagctagcatacactgtgaatgtaataggccatagcagtcccagtacaatggcaaaagcctcgataccctctctgtgatctttagtcgcactagctgggaagttatctttgaaatactccgtgatacccatgtaggtccacatgaacgcaattccccacgcgagcgcgaggacgaatagcattgggattatctccattactcccctccttttcgaatcaagtcgaagtaggcccacacgtagaagttgcaccacgctctgcctatggcccagccttcccaatagtcttcccagtccttgttcggagggttattctcgaacatggataacacgcatgaatcagctacttcgtccaagaggtgcattaccgaattaagcggcccgattccaaaggtcttatctagccaccccttaaatcgtcccacgtctgagacggtgacgctggagtcactgcacagtgccaatctctccagaatgtagcacatgtaaggctcttcttcgttctcgaagaatgcccgcatgccttccttgattagtggtgcaatactattagagttcattttccctcctttcggatcaggtcgaaataagaccagacataaaagttcatccagttcgtctcagtgtctcttagacaattgcgatgaagataagagataactgattcccacgacgtaatcccgtgctgctctattagccactctctgaatgaccgatactctccgtgggtgatttgcccttcttctactaggtcactcaggatataacacatatatgtgtcccgggcgtttaccgagtaatcttccagtccgatctttatcaactctgcaactgatctcattgtttcctcctctgagagccccactagggctctaaatttttggttcgacctgcggtcagcacatcacaacccagttgtacaggtcggcctcctcataagctgatgggtagcgattgtactccaagaagaacgcgtggtcaatagctgagtatttggttgcgaaactcgtaatgtaagtcagaaacccgttgtcctctttcctgaacagggcgtattcttcagtaccgtccttaaacgtatctagcgagatagtatacttgtcgaagatcacagcatttcctcccggctaatgtagtagttgtagttgtcctcttggacgaggaacgcacgatagaagcctttctcaaagtctcccttgaccagcaccagattgccctccaccttgcatgtatagatatacatggtgtttgctactcggataacaggatcatccccgggacgaacatccagagcagagagcatagcctccattggcatgcttgtcaagtgtgcaactacagccgagcagtattctgcatcgcggccagaagtgtcctctgcataagcaggagcgaccccgcacgaatgcagggcgagtgtaaacgcaatagctacgagtttcttgaacatactaaccctcctcttggtctgtctggggaacatccggctttgggtagacgaatgtctctggatacttcatgcatcttagctcatctttgcagaacccgtcaatcaatttctcatgtgcgaattccgcagccttgtagtagcgattagcctgtcttgcctccactcgaaggaggtggcttatcgtgtgagcgttgatattactaagacttgcaaaaattgtcaagagcttttttgcagaaagaggaatcgacctttcatcgggtctgtaccagtccagccgggcaactccttggagaacgtcgtctacccacaacgggtagtctccgtctagctcgaccatgacttcgtacatttcaggctgaacagcgttgaaaaagaaagagggctttcgccctctgctggtatctagaggaggaacaagccccctctccaccttgtgaatcaaccgatcagcattcgcccctatccgagactttagctcctcgatctcttcacatgtcaacatacggagggcacaccttagatttctcgatagtgaacacgccttcgcatgtcaggttagcaggtccataccacttgaacatgttgttgatatcgtatcgaatcaactggcggaacttctgcccgtcgcacatatccacgtcgaaccacgccacgacccatctgacgtaatcttcagggtcgttctcttctcgccatctgcactctagatcaacgtgactgggctctagaacgtaaatgtcttcgaaccctgtactctggttgttcttaagtcggatgattcgagcgcgaatccattgcatgcacctgcggtttgggtctgtgatatcgcagactaccggaacctctggaacctcaactgtatacatgattgtacctctatttgttttacaagaacgccatgattctgtctctgtctgcatggcggtacagattgaagcaaggcacgcctctagaggacgccagttgccaagcggtcctagtcccgccttctggaatcccgttgtggtctgtcttgctccagcacaccaagaacttgctaggcgtgttgagatcgattcccagcacttggaaaacgttccgagtgtgggctcgtcttgcgaacgggcttagaacggacctcccgtcatttctgacagagttccaagccggatgaatttgactggcaatgcctttagcttcttcccattcagccggcaactcttcctctggcaggatggtagctccgagcgtctccgttatctggtactggttgaagccgggagacggaagatagatttctgccgtagttcctcccttgttattggatatataatccagccagcccgattcgaacgctgagtccgctcccttcgctcctcctgaccgaagaataaaaccttgttctgccagtttacggcctacctctcgaaggatgccccactctctgtttggcgtatccctacttccgactcctgtgtaatacttcataagatcaccatttcggatagctcttctggtgttacccattgatgccggtattctccgttcttcgggttagaatattccaatagaacagggtaatactcgtctcggtaatcggtgtctataacctcgcagttccaacctacagggataggacaagaacgccccttgggggccatcttagttccaatagacaacctgccttgactagccgcctcattgacgcttatcaggctgtatctgtgttttaacgcttcaactaccttgacttggaggtctaaaagttcctcgattgtaaagtggcttacatcgattgtcatattactccctcccttccagtttcttgaattctttgtccagcttagctagatgcttatccaacttgtctagctttttatcctgataaagctggaaagcctccgagcccggggccaaccaagtccccttatacttaattgcaccccggatcatatctcctcctattacagttcgtaaacgtatacctgaaactggccgagcgtctcctcgataagaggctcgacattgctccagtcctctccggctaaaccgcagccaatcttcggcagacctacacacaactccgaggtaggaatcgcccgagcgtcagcctctgcctcaaggaacagagacatagtgtacagggcttggcccagtgcgtcaagctgagtgtagactcgtccctcttctcggccatagttgtactgcccgtacagattgtaaatcgatccatactcgttaattgtgaaggtgagggagccgagtttgcctcgatcccctttcaccgttgcttggtctgcctcgtaggcctccgggaattgctcccggatttgcttagcaatgccgctgcccatggtgttgaagcaattagcctgatgtgcaatagcgtgcaactctttgtttttgaacgcggcgagcaggtcgccctttcggtatttaatcatttgaacctctctacacttgtgaatctgacttcagagcctctcgctccgtgagcaatgtccgcgtacattgagttaatggcagcaaacggggaccaatactccttctcccagattttgaacttgaacattttgtgccctttattttctgggcgaccttgttcgcagaaggttgtaaagtaatatttagctaacacctttatcctccttatactccgttcttaatccgataacggatagatgccaagtcattgttcttcaggtcttcggtgtcccatttcccgtctttgaagaacgtccgcaaggaaccagtagcctcctcctcttcagatacattatctttcaactggaggaatcgcccattttgcaggtctcggtacactttcaggaggcctttagccgacttcttcttgctgtcagttttcgggtctttgaagattgcaatgccttcaccgttcacttccgtgtaggtagctttcactgcgaatccgaaagtatcccgggtgttgcactggtaagtgtaactgccaactccaaacactacgttcagggaagcgaaacctttctccttcaagcgctccaagattttagctgctcggcgagttgtaatggaatctccatagatcaaaccgatatgagaatcgagcatcttatagcctgcttcgttcacagtaccgccgaaggtttcccacagaacttggatagctcctttcacctgcgcctcgctcacttcttcaagtttatagccaattacatactcgtattgatcccactcagtgggaataaccttgaagtacttatcttcaaagttcagaacaaatgcatcgtttccatttactgcatccatgatatcccagtgttcgagcgactcgacaacttcaatatcacccagtccgcagataacctctacaggatcaccagagtctggacgaacaaccagcttgccgtcacgttccatgatctgatccttgatggacggcagaatgtcagtaagcacgccccagaagtcgaagctgtctgccacgtaagacagaataccactcgggaacttacccatcagttcaacaaggaatcgacgttctgcttcctcacggccacctttaccttctccatccttcatttctttctcaatgcggaggatgttactagtagctacagcgtgttcagtcgcaggaacggagcaagctaccaaaccagtcgcgttatagtagtcctcagcataaatagctgctgccaatgtgtccgaacctacgaacgaggtcaagtgaccaacaccactacgggctgcgtcttcgatcccgctcataccccgggcactgaagtcgtggaactgaacggacagcaggaagtcgtcatagcatccagtgtgattcgcgtagtatcggcccatagctgcgtattctgcggcgatagtggcgttagtcgcggtcttccaagtcatagcagaaatcagtgtttcgtggtagttcactagccagtagaactccggcagggtgttcttgatggtgagaacaggcacgcccatcggtacactgacgccttcagtcagagacttgacctccagaggcagatagccgagcttgtgtagggctcgaagctgctccacagcctccatttcccggccaaaatagccagtcaggaaccgggcataccggccaacggcgttctcttcttcagccgcgaagaagccttcccaagactctacgatctccatccaagcggcccgtccgccgacccacttgagagtgccgtcgtagaagtcggtggcatgcgtctttcgataaatcttatcggagcgaggggtcaggttgctatagacaagctgagtcccttccgagtacatggaaccgtgtccaatcttataaccatcggtggaaagatgtggcagaattttcatgttatttcctcctgttgtgttgaataggcccagactacatcaatctgggcctcctgtcaatattcgacttcttctactggcagcgtcagcacagggtagatgcatggaaggcgcagcaatggttgcttcttgctgtggaagtcttcccaaaacttatcgtgcatcgtcttgtaccgagcgtccagttcctccttggtgtcgaactcctccaccttgacaaccctcttctctggagccgaacgcttatactctacaatccagatactcaagctcacaggcgttccgccttggagtattcaaccggaatgacagtcagcgcttcgtgctctttttgagggagcgtatccgaggtgtagatgcatccgaaggaatccagcaagcagtcgatacccttactgaagattccatgagtgacgaacaggtcagggagcactttactgtactctcttagggccttagacacgcttcggaatgtagcacctccgtcacagatatcgtcgatcaccagaagcggaagttcaggatcgatatccgaaggattcagaatttcaaagccttcgattttaccggtctggagatcgcgcttcttattgcaacgaattacagcggctgctccggccttctttgcaaaatcctcggtccgctttgttgctccgatatcaggggctacgagttgatattgctcccactctgaacggctcagtaggccaccgaagaccgaagattgacggacaacttcgacgttgttaatcaggtgcagagttgcgtcgctgtgagggtccacaacgataactcggtcatatccggcagagttcagcatgtttgcaaacactttcaaactgaaggcgtcgcccggattgcaccgacggtcttggcgagcatacgggacataacccagcagaagagtcatgtgcggattaatcatttctgctcggatcgcctcggtgacgttgagaagagccatgatatcatcactattctgaatctgagctttaacgtttacgaacgcatggctttcgatgccgcccacattaacgcccacttcgccgcccgggaacgtccacacttttgcctcttgccacggacggctcataacaccttccatttcctgaaggcaacctacagcataactaatcatacatcctcctcacagtttcacagagaagcgattccgcattgcttccatcgtgctctcgggaacatcgtgtacagacttattcccatgacgattctctacaatcagagagataacagtgtagccaaactcttcagccatgtcaatgtatggtgctacctctcgctcccgggtactagtattggatacgataaccgcatctagtcctatctccatagaccgtcgcgctttgtccatgcactttttgtgagattcaactaccctctcagctttccacacatacttgccgaactccatttggtaatcgtccgcttcgcagatagacgcctgccggcctgactcccaagttttgttatacagaatctcggcaagagaggacttcccggagcccgggagtcctcgaatgatatacatgatcttttcttgcatacttcctcctttaaattcgagccatatcgaagtaggtttcgatcagaagtcgtcgctgtgcatcggtcatttctgagaaccgagcctcatccacttcatttaccaagaagtctaccagaggatagaactcttcgtcaagcgtctgcttgaatccagccgggtcttggtacatcgcattgaccttcttactacccatcctcatgataaacttcttgccgaggtagtgagttgacttgcacttcactgtccctagccctgtttgtaccatgtaaccttctttctcacaagaactcagaagaccctttgcatgttcccagctacactctatgtgctctggacgaagaatctttacagaactgtggtccgttacacctagggcgtgagagtcaagaatatattctgaaagctggcccccagtgaagatatcgcggataccgatcaaatatgccccttcttcttcctcgacaatgtgagggtcgtctggagagcatatctcgaagttatatgtgaagcctgcgatgtaatcatctgggttattcgacacatacttctgaccaagggcaacgtaatcgccggtcaatgaccccgtagtactgaagataagggagccattgtgcttagtcacggagaacatgaatccattcactttctcaatcagccgcacacggaatttaggatggaggaaactcccagcaccattctctcccagattaaacaccttctcgaaggggcgtacaatacaatcaccggagtgctggtcaaatacatgaccccgtgcctccagaagaagcgggtgcttgttccacaagttgtcgtagaataccttacgagcgtatttaataaccgacataccgttgaagtgcttaacagtcaccagcttattagcgatcaggtctttgtacatctcaatatggagtttaccttccatcctattcctccttattctacttctacaatcgggcagaatttagacttcttcgctttcaaatacgacaagaaaatcccatcctttttatcgggcctcttagacatcagtcgagcgagccgatagaagaccgatacaccatagaatacagccgctacggcaatccatataaaccccataatagccaaagtcccgcctagaatgtagccggtcgcgggtccaagtagcagtgcatacaggctggagcctataaccgatgcaaatgcgactgaactgagggctagccacactacaagaaagaccgtttgccagaaataagagcagagagtaacgctcttccatccgctggaaatgtccaagtaggtaggactttcgaatttacgatgcaggcgcatatgccacgaattcttattaatcttcatgcttgttcctccgggaagatgttgaaattgagtacgttgtgctcttcgagttcgaaagaagctaccatcttgtagcctccgagcttgtcaacgatctccagtatactctcgatagagaatttgtcaacatgctgcttcatcagattagagattcgactctgatgagtaccacatctctcagctacttcccgctgagtgaggcccgactgagaaatatagtgtgcagccactgccattacagcctttttgaaatcttgaactgggttgctcatgttaatcctccttattactcagtgtaatttttccgctaaagactcgaaactggctgatctcgaactggtcagtccagcgagcgtcttcgaaagccactccttcgaaagttccatcaaacttgacgtctgaagtcatcagtacaatgaaaggcacgccttcatcgtggatcagctctacaagagtattagccttgggtgtaataccgttttcttcacgtgaaatcaacacattaaccatattatcctctctgtccgtcatggtgatctactaccacaaattcttgattccgcatgtattctctcacttcatcgtaagagaatacctgatgatctgggtgattgtcaatacctacatcaagcctctttcctttggaaggcaagctgccgtgagtgtggccgtgtagatgccaagcaccatgatgagcagtattccacgtctcgaaagggtagtggcacatcacgatcttcactccgtcaattcgaatctccttgtactcacgaatgtcttctacgtgagagagattgctatcagcgatcaacttccacagacgagagtcgcaatggtttcccttcaggaaggtgatacggccattcaactgcttgatgatatccagcacaggctggagcttgttctttcctgcaaatgcgaagtctcccagatggtacacttcgtctacccgacctacccgggagttccaccgagaaataagctcctcagtttgctcctcgaaagtccaaggcctgttgcagtattcgatcacattcttatggaagaagtggagatcggaagagaaaaatacagacattatgcctccttttcaaattcataaatcttgttgatcctgcggatcagtcgaatagcagcccctcccagcagatgctctcgatccggtttcatatgggccattgccttgaactctgacagcatatctcggcgttcatagtggaagtctactacccagtaggtgtctgcattaatcttaccctctcggtacaggtgcccttcaacaccaagccagtggtctactgcgtctttcttcagtaactctttcggagaccacttgtctacaccccgcaacttctcgaagaaagagtaaggacgagaatagttgttgatggcttcctctacagccgactcagcctgcaatttaatgaactcccatcttgcaagaacttctttaatctcctcggtggtggctggggtgtagctgtactgctctttatattcattccacattatactgttctcctacgtagcctttgaatttgtcggaacgggttgtcttcttctgtgccttgttttccagaaccgatgcttccctttcgagcatgctcagttggttgctatacttcttgatccgtttcgcattgccactcatcacagaatttgtaagattggcaatagtgtcgcagattttaacctcttttgcaaccggatgattacggcaaccctcgatatacttccgatagctttcagctcggtttttgtcaagaatgaccagagcctctacgatatgcggcatcacgcccatagactctaagtcctcctctgtcaggtcggtatcctcaagaacgtcatggaggaagcagaccgctagaagggtgtccatgtacggaaagtccgagaaggcctgattcgggtccatatccttcggagcattacgtgctacgcagattgtatgcacttggttcagatggtaggcatacggatagttggtctctccataccgctgaccttcatgggccgagagtgcgatctcgatagcaataccgagctgagttttcatgttaatctcctttgtagaatgtgtggttgcctatcttgatggtacgcttgtacttccgagcccaccgagggagcctgccattattggctctccttacctttctctcgttcaggtagtggtccgctcctcccgttggatcaacagtatacccatacagagcgttgtatgcaacatgttttgctgtctcccacttgtcgggctccttgacgccctgccgcatgctaccatcgcaggtgtacgaatattgacatttgaagtataacactccagctacggtgctgggccacctgtcgtgctgcatcctgttgatgacggtatgagctacagcaatctgcccgatttccggctctccacgggcttcgaagtagaccgcttctgccagcagtctgcaaggctttctgtactcgcacagtgttcgcttgctttctatgatttgagcgggactggcttggaactccactacaggctccgtgccgtattttagacgagagtattccatgtcgaggaacatcccaatgaaggctagaaggatcgacaaaacgagagcttctaaggtttccataacacctccttagacaaagaagcccgccttgtgggcgggctgtatatcactcggctattatacttcagcccaagttgtaacgacgggcgtagtctttgttggggaactcgaccatcatcgactgaatgtgaatgttgcctttacgatccttctggattttggcatttttcacaatcttacaggcctgcgccttagccataagctcagggcttacaaccagatcgatgaaccctgcactccgatacccgcatccggcaggggcccagaagccgtgctgggtcatcgtcgagccgggaacgaggtacaggttgtgcagacgcacagcagtgttgaaactcagcttgctgatatgcttcgcttcccgagtttgggtttcaaaacacccagtcgtgtagttgaatttgtaagtgagagcatccatgaactgaatgacgcttcgaatctggatagcagaagtatccaagagctggaactcctcagccgcgtcgattgcagtggtcacgttgacagacttagcgttgaacattttatatcctccttattcttcagggacaaatacaccgccgattacccagccagcgcgaattagtttaccagttgggaactgagcacgcaaggtctttttgaaacgactttgaatttgcacagttagccacttaccccggtagttctcaaaattagtgatctgatccttgcgttcgtcaaagtcaccgtacgtcacttcaagcagctcttgaggtacagggtcaaacaccaccagaacagcgttcccattcttgtctaccacgtagttcacgatctgcatttccatatcgaagaactctttgtacttctggagaccgctggagcgcttaccagattcgtacaagccctctgggctgcgccacatgataccctcataaccgttctgacggtacacgtcgtgaagacgtttgaggtcttcgaaagtggagcagaatacgtactcaacgaatcgaatactccccagatcactgtgtagtgcagactggaactggaagtctaccagacgctccttgaatgtcaagccttctttcacgatatcgaatacgtgaaattccagtcgctgccgcagtccgtaaataaacgatgtgctatctacttccttaaggagccgatcatactcctcctctccgtcttcaataggataggcgtccagagctttctcggccttcatccacttgtcgtaagcatcctcccgcttaaccgcagagttgatatcttccagcacctccccatggacgtacagttcgccgtcccacacatcaccctcttgcatgatctcttcgagttctttgatgatgtgcggtacattgtaaggtttacccatgcgagacgctagcgtaactacgccattggctttcttagccatgcaacgcaggccgtctagtttaggagagccatacccctctttgtatttagcgggatcaagcggttttgcgagcatagccataacagggagatcgttgagttcttccttggttgcacgataacccttgtccaactgcttgctcaccttggactgagcctcagacacggcctgctcctctacagagcgtttctgcttaccaactcggatgttggtaacctgagaggtcatggctccatgttctttgccgtatttcacgacgatattgaagctaccgtcttcctctccgaccacctctacagtccactccttgaacccgcctttcttgtcgagtccatacagtcgttgaaaataactcattgatcctcctcgtatttgatgacaagaacatcattctcccgtaggtgcctaagaccttcgtcgagccgatattcgtgcttatagtacactactttgatcccagcttcaaccaccgagatagcacaatttttacagcaagagtgagtgacgaacagggtagccccttgggcactctcagggctgcgtataagggccctcagtgcgttttcttcggcatgcctcacctctgccttggttactcccgtttcgtcctccagcggcccgtttaagtgctctggaagggcattatacccgcaactgatgatacggttacgttttactagaactgcaccaaccttggaacgagtcgagtcgctgcacttagcgaaggcctcagcggcctccatgtaagctttaatatgcttaaccttcacacctagcctccgccgacgaggacagcaatctcctcgtactcttcagtggatgcgaactccatgtaatagtcgtccgtatctgacaggtaaacaacgataggcggataataactccatacagggtctccgtgttcgatttcagctaccctcacattgccatacactgtgcgaagagtctgtagagcttcgatcacatcgtcaatacgcattacagttggttcagtcatacctgcctcctcagttttctactttacaaacggcatcgccgcgtcgaaggaacacttgcactgacggctttccgctccacttgtcccacgcttcagctttaacactgacagtcttaggattgatggcaaccacctcgcctaccagcataaccattccagttccgcctaggcagaatgctactgcgtcgccgatctcgatatcccttcctgctacgtccttcatttgtactctccatctacacccttgattaaaataacgaagtccgaggggtcatcactgccgtaggcctttgcccgaaactcctgctcgtatttattcaccgcctccggatcacttttaacctcaagctcttggtagaggtcttccataaaccaacccaagtccgtggtcgcagccgaagccgagaggtgaccaagaagtcctaccagcatattgatctcgtcgctctccaactccaacttgtgaccgttacgttttactactttcatatttcctcctatcgcttctgtccgcgacgagtggctacgccgtaagctggcttgctcccctcgcccgtgttgtgtttcttctgcactcggctggcattgacggtgtaacgccctttgccatactcttcatctatccacgcttgggccttagctcgctgagacgtgtggacaaagatgtagtagccagatgcatccttgataaaccaagtggccgggggctggaagtccagacgtgaaaactcttcatagtcgatcacagtcaccttctgcttagccactgtatactgccccactaccgactcttttgcaatgattttatcaatcatctgagttgaaagatcagagttcttcgaggtcaatttctacctcctttcctagtccagtatctgcaaagaagctatcgagactcagagcgtggtattgagacactttgtaaccaccactcttcagaaggctgtgagcggcctcctctactttgtcctctgtcagtctccagtccgcacctaggagtacttcagctaactgctctacactcggagggttcccaatccacagacccattctactgtcaggctcgtaatcttcttcccatacaagttcccacactaggttactcattggtacacctccttcttacgaatagaatacataacccactcgtcttttcctgtcttcccgcacggaatgtctacttcacactctgcgtttacaatcaggcccgctacgatgaaatcaagaagctcctcgtctggctctggtaagcccgggtaggacgatacaaccctgcggatagtctccgatttggtattgcccagtaccccaagcatgtggaggtcaaactctccactgtagtcgtcccagagttgtccaaatatcacccatacactattcatacctagtaatcctcctttagcttgttggtgtccattaggcagcctccttcttcttgtccagcaacttcaggcatcgtttgcaggtgatatgattgcggtagcgggagaagttcttctcctcgaagtcgccatcggtgccacagaagacgtcatatggttcttcactgtccgcttctgtgccgccgtcccactcgtcgtagtgaactgctcgcgtcgccattcacttcacctcgattccggcttgctggagggcttcgacgcactcatctcgataagcttgaaggtcttcgtcgaatatgactctcggcaggtccaccctcagagccgcgcggctggctttccatgcctgccacatcagcgagtagcggtgtgctgcttctataagagccacgtatacgtggacgttatcggtcttcacaggaaagtagtcggtgttacgccactcgacaccgccgggaatcgggaaacagttttcgaactcctctctcatactccgcaatcctcctgaatttctttaagaagctcagagggcataaccgacagagccagttcctccagagcatggatgtaatcctcgacatatttccattcctttctgatcttctgaaggtacacgccttctttgctgttgtcgatagcctgaccttccagctcctgcatcagttcgaacattttgtatatcctcctatggccgcaaaaatggccggcgactactgtcccggcctgatgatactactctgaaatttcttccattgcaagtcgtttcttttcaaagaaatcgctgagcttgtcttctagctcttcgccaccgatgtaaagctcttcccctgcctttacacgctctagctccttctcagtcaagaagtcactgtagacgtgatctacccatttatcgcaccacgctgagctaaacgctgcattcctcaggctattcctgaaatcagcagatacaacgccaaaagaaggcgcgtggatcatgaaatatgtgaactggtcgatctcaacggagtcgcaggctagcgcgatggcagtcatggcagacgcacactcaccttcgagacgagcatgcactggagcttgacactccttgatcgctcggattatagcgttggcggtctctacctgtccaccgcatccgttaatggtgatgtacacttcatcattctgacctgcattttcaagggtccaaagctcctctgtgagttcttcgaggctctttattacgtatggcagaaggatggagtaacgattgctaacactttgtgtacatgaaacaggcataatacctcctttacaaaaatgggcccgaaagggcccttattactgaatcactcctcgctttctttctggccagagcccagcattgcaaagaatggaaggaggattgtgctcagctctccgctgacagcttcaccaacttctgcaccagcctgagctacactcaggaactcttcagtgcgtacaaacttgtcaaccttaacgagggttttaaagtctactcgttccaagaacgcagcgccggctgcttccgccagaggttcgaggtttacgacttccatagcgcgatccagagcttcctgattgatctctaggccgttctgtgcggcaacctgcatcagggtagacttcacagtctggattgcgtagtctttgaaaaactcacgttgtgctttgttaaacttcattcacttttctcctttgtagtacgacgacggcgggtttttggtttatcttccgattcagtctcttggacttcctctacaggaacttccttagctacttctgtagccttttcctcagtctgcttctctgcaccttctcggaccatcttgacagacttgagagcgaaattcatgttagcgaagtgcgggtcttccacatcaattcggaagccttggtcaaaggcgttctgcatgcccatcagaagactgaaaacgtcccattcttgcacaatgacttcattgccgtcaagctctttttcgatttcctcagaaacgccttcctgacggaacatctggacttgacagagggtgccatacacaggatagccttcgatggagcggacgactcggaaaccttccttcatgtgggcgtgaatcgagcgaagccagacgatagggttgtattctacgatattgataacttgcatattctttttactccttgcgggttagtgttttacaataataccacgtttctcaggaatgtcaacccattttgttctggtagaggcttgacatagaggaaatctgtggtattatcaatattcagcgtgggagagatatgtctgaaagcactcaccggcccacgcctagcgcctatgaagaggaatccacaagggcaacctgaactcgaatgctgttaaagggtggagacgacgcgaaagcggaatgacagcaatccgatgcagcctacatgctgcccctcaccgaactcatctgcatgagtaagaggaattggatagagccaaggcacgtcttaggcagattaaattctgtatggcgagccttgggacgactctatccttccctagccgaatctatctgcatggggtgttctcctgatacacatacacaaatacccaccacagataatccatcaatcaacccataaggaatttctatgagatgtaagtgctgtgatagcgaactctcgtttgagactccagtcatcaataaacatactggtaaggaggacgatctctgctcctcttgccgtaggtttgctctcaatcctacactggatcatgagtattttggtggttggtatccaagcgaaggggttaccgctcctctccctaccggggactgacattgtatatagagtgcgcgtactctgacaatatgtataaatagtagattacggtgcgaataattctttaagggcttgacaacaggagatttcgtgctataatcggagtatatggggcttacaaagcttcagaggatttaatatgactcaagaaagaaacaagggcggtcgccctacgaatgccgagctagaagcccggggtatcattcagacagacctgaaagcagggcttagacttctaaagaagagctttgcagagaacatcagattcctccaagagcaatctgacaacccagaggtctctctacagatgagaatcaagctcaagaaagagctttctgacatgttcgtcgcttactacaaagctgacattgcactcaaaaaagagcttgcaaaaggaacagaatcaggagataatgagaactctgaagaggacaagactcccggagtcgttctcgcgttttgattaattgccgcttcgttcaatggtaggacgccagactttgaatctggagatgatggttcgatcccatcagcggctgccaaatgtagtaaaagaacattcacccgacaaggaatgtgtctcgctcagaggacagcgagtaataagtgtcctccagaattaagggtcggtgagcgtaattggcaacctactggattccaaatcctcgtattctctgttcgaatcggagtcggcccgccaaattagtgttgacaggagcaaagacctcttgtatagttacaccaactgctcgtatagtgtaatggacagcacaacggtcttctaagccgtaaggtctaggttcgaatcctagtatgagcgccaaattagatggacggaagctaaaggtgccacctgggtccttttctaccgttcgtatagcatacattatacgaagttatatcacgtgctataaaaataattataatttaaattttttaatataaatatataaattaaaaatagaaagtaaaaaaagaaattaaagaaaaaatagtttttgttttccgaagatgtaaaagactctagggggatcgccaacaaatactaccttttatcttgctcttcctgctctcaggtattaatgccgaattgtttcatcttgtctgtgtagaagaccacacacgaaaatcctgtgattttacattttacttatcgttaatcgaatgtatatctatttaatctgcttttcttgtctaataaatatatatgtaaagtacgctttttgttgaaattttttaaacctttgtttatttttttttcttcattccgtaactcttctaccttctttatttactttctaaaatccaaatacaaaacataaaaataaataaacacagagtaaattcccaaattattccatcattaaaagatacgaggcgcgtgtaagttacaggcaagcgatccataacttcgtatagcatacattatacgaacggtagtcctaagaaaccaccactgctcactgccaaaataagtgattttaagtgttgacaaactgaatttttcatgttttaatacacttatcagatgaagaaacaattagcgagtagccctgagtaggtcgggaactagtctagaaaactaggccactgcgatgagcggtgagggttcaactcctttactcgctgccaaattaaggccctgtggtggaattggtatacacatcagtcttagaaactgacgccgagaggattgagggttcaagtccctccggggccaccaaattaagaatctcttttgctatttggttagggttcgagtccctacccggcgactatggccggtctatggcggccaaatagtgagagagctaggggacatgacgaaggtagcgctgctttccgatctccccggcgctataaaagttatcatgaaggggttgacaaacaagaaattcatgataatataggtacatagagtaacaaacaatgtagccgggtagctcaattggtagagcacccgaccgataatcgggtggttgaaggttcaagtccttctctggctaccagaatttaaaggcccattagctcagtctggactagagcaagcccctgtctagggcaaggtcgtcggttcgaatccgacatgggtcgccaacaaggtcgttgtagagatagatggctactatcatccggctgtaacccggacgccataggctagaggttcaattccttccttcgaccaccaaatagcgagagcgttaagactggctggcgctgtcactcggctcataaccgaacacaagtggttcgattccacctctcgctaccaaattgcactccgaggaaccctaagtggtgggttcagtgtcgctacctatctcggtaaggggaagcgcctaagctggcacgggtaattgagtagctgtgataagctactggcagccagtataaatcgtccggctcgggcccgttatagctcctagatttgaattagatgctgtaagccataggaggtgatccagtatctcccggaggggcccgggttaacaacctcatgaatttagcccgcgttggccgagaggtttaggcggcggattgcaaatccgtctcacatcggttcaaatccgatacgcggctccaaagtttattgggatgtagctcagtggtagagcagggagctgttaactctcaggtcgcaggttcgagccctgccgtcccagccaatttccaaaagagactcttcgctttagaagcagagtcgaacgcccgatacgggccttattatctcctcgtagctcagtctggttagagtgtcggatttggaatccgaaggtcgaaggttcaaatccttccggggtgaccaatttaaagcgggtttcgtatagtctggttattattcttggcttccacccaagagactagggttcgaatccctaagcccgcaccaaaagtcgtagacctcagtaacccggagtaacgcccgggagaagatgtgagttctacgtatacgcgtctgaagctaactaggtagaagcaccgggttgaaattccggaggacttggatcgttaccaagcgggcgcaccaaacaatgcagttatagattaaatggataaatcgccagactttcaatctggtgttccgggttcgatccccggtaactgctccaatcaagtccaagccggaacattcctccgtatgtgctttcagccggcttggcattatcagtgtggagattgtgcagcccggatgctgccttccggttgtgacccggttgttggggttcgagtccccgcctccaaccaatgttgtggaattgaatcacaggacgacgactgggtgagattgagcgtcctctagcccgaaagggtgttcgcgcaaggcgaaccgaagccgaaaggctgaagtggtgcccggacccacaaccaatgttgtgtaatggaactattacgttgacgctgtgtgctctccggatcgtaagccggtaaagcgggaatagcgggctcccgtagcagagtagtagtgtggttcgattccacagcacgacacctttcctcctcgcctgtgctgaacggtttcctcctcctttcccgtctcacaggctctattccctgccctttaagcatttatggtgatgcaccggctttgtaacccggcgaattctgttcaagtcaggaatggggcaccaattcactatcaaagaacccgcaagctcccgatagggttcacactctataaggttgtagcatggaaaacactaaggttcctgataaaaaactcggaccaatcgcgctagcgcttaaagaggccagagagaatttcgatctcagccctcatgttattggtccaaaatctttcaaacagaaggagttcacagacagcgatgcaaagatcactgtattcggtggtgctgctggtgctggtaagtcttatctcggtgtaatggacttcatgaaatatatccatgatcctaacttccgaggtgtaatgactcgtcgtactactcctcagattaaaggcccgggcggtctgcttgaaaaagcaacagacctattcaagctcgttgaccctaaagtcaagtggaaagacaaagacggcaagtttgtgttctcttctggtgcagttattttccttcgacacttcgaacaagaatctgacaaagactccttccaaggttgggaggttagtaagttcctagtcgacgaaggtcagcagttcacagaaggcatggtgacataccttatctctcgtatgcgtaacccgaaatgctcggttgttccgcacatgaagattacatgtaaccctgattacaattcgttccttcgtaaatggattgaatggtggctagaccctgacacaggaatcccgatccctgagcgctccggcgtaactcgctggtttgtacgcaaaggcggtaagatgttctggggagacaccaaggaagagtgcattgcccttcatggtaatcccagtctagcgcctgacgatgaagatcaggtgaagcctatcagcttcaaattcatcgcggctaactgtttcgataacccaatcttgatgctcaacgaccctgagtatgtagctaaccttgaagcccttcctagggtagaacgtgaaaagctcctagacggtagctggcacgctagagaagagggagctggatacttcacaagggactggtgccaaatcgttccccatccgcctctacgggtgcttaaaagggtacgtgcatgggacatcagcggtagcattgaatccgaaaccaacagaaaccccgactggacagccggcgtgctgatgagccgtacaaaagaaggcttgttcactgtcgaggatgttgtcagagagcgtaggttgttcggaggtgttttcgacctcattctagaaacagccaagcaagacggtcaagacgttgaaattcaaatcccatgtgacccgggggctgctggtaaagcttatgctgcacagctaattagagacctagcggatcatggattccacgccagaccgaagacaactaacaaatcgaaagttactcgattcgccccgttcgtatctgtagctgaaactaaatcagtgcaagtcgttgcgggagattggaacgaagattacttcgatgaacttgagcgattcgacggaagtaaggctatcaaagatgaccaagttgacgctacatcagatgcatttaatgctctatcccttggcagcttgattatccctgatttcctaccgcctgatatgactcaatccaacaaattcaaactaaattaataggaggcggcgatggccgagactgaaaagacagcaccgggtatcccgcgacttcgcctaggcgagattggtagtacaggccttaaacaagtcaatggtactattctggaagaacgccgaccagaacttcggttccctagggcatgcagaacattccaaatgatggcggaagaccctaccatcaaatcagcactcgatctcttcgaaatgatgatgagcagggttgactgggaagttgatctaggagttgaccccgacgaggctatgaaggcccggggtaaattcctgaaagagtgcatgcatgacatggaacacagttggtactccttcatcaaagaggtcactagcttctacacctacggattctccgtacatgaaatggtgtttaagcgacgtgaaggataccctgtatcgaagtacaatgacaacaaattcggtattaaaaagttgccaatccgctctcagtctactatcaccaaatggttgtactctgaagacggtagaaacttcctagggtgtgagcaaagtcttgccaatgttgtcaatggcgaccgttacgtcaacctaggtaataaggacggaactgtagagattccagctaagaagatgcttcttttccgggtcgatgctaaacgtgacagtcctgaaggtaacagccctctccgtgcgtgctataacgcttggagatatcgagtagagattgaagagcaagagtccgttggcgtaacacgcgatatgaacggtatgcctacgctctatctgcctcctcgatatatgtccgaagatgctacagaagctgagagggcagtctacgaatactacaagcgagtaattcgtaacattcaaatgaatgaacaatctggacttatccttcctcaagcgtttgacccagaaagccgacaacctctgttcaaattcgaactgacctcttcgcagggcagtaagatgtatgatacagatgccatcattcgtcgctgggacaacaaaattctgcaagccttgtttgccgatatgctgaagatgggtcaggaccaagttggctcttactctctagctggtgccaagactaacatcatggctatggcgattgaatcgcggctccgcgaaatcaaagacgtactagataataaactcattcctacgctgttcgcactgaacggtgattatagtccagacttgccgaagctgcaatacggcgagctagatgaaatcgatcttgaagagttctcgaaagggattcagagaatcggttctgtcggtggtcttgaacgtgaccgtgaggtttacaacaagattcgcaaagctctcaagattaagcctcgaccagacgacgagcctgttgatgtggataatatcatgggtggtcagtctcaagcaggtaaagctggagtaggtaatggtgcatcaacatccgcagccggtagagacaacgccgctgcaaataacgcataaggagacagaatgctgactcttgaaagtgttattgaagctctcagcaatgctttcggggctcccgccaaggcggaagaagccccggctgtagaggtcacaaagtccctagacaatgaaaagaggatggctttgtttgtcgttcttgagccccaagaaggcgactccacgactgacctacacgcagacacctactccgaagaggaagtagagaaagcttgcatcaacttcaatactcattgcaacgtagctaatatcttccacaagattgaaacacaggaagctgagattgtccagtccttcatcgctccatccgcattcacaactgacgacggaagagagatcaagaaaggtacatggctccagtggtggcacttccctgaaggctctgaagtagccgatgcactatgggaaggcgttaaatctggtgaattcacaggcgtctctatcggtgccagagctacagtcgaggatatcgaatgaccgtaaaagcaaaacgtaaactgaccgatatcaagtttgaacacgaaggtgctcatgtcgctctggtcagtaagctccaaggtggtgcagccaacgggcacactactctaatcacaaaagctaccaatggcgtaactgaagagcttatcgataaagctgctgaagttacagtcacaatgcagttccctgagttccttcgtaagttcttcgggatgtattatgaagatgccgaagttctctctgttgccatgggatatggcagaacggagtatccagaactagatcacaaagactggatcgaccagcgggtcgagtctatgtccattcttaagtcggtttataaatcggctgacctgaatcaagctctctccgagcttacccctgagcagaccctttcccttaaacaggatcaggaactgcttgaaaaggctctggaggtagtctccgagcaatccaatgaaaatccatccaaggagattaccaacatggaaactatcctgaaatcggcccacctagaagctctagctgacgctattgcagttgaaaaagctgctggtgtcgctgctgttgcagaagttcagaagcaactagacgccgctaatgtagagcttacagctcttcgtgaaattgtcaaggctgctgaggcagagaaaaccgctgctatcgctaaagcccgtaaagagcaactggctgaagtcctcccggctgaccaagtagaagatactttcaagtctctggaagttctggacgatcaagcttttgcacaaacagtaggaacgctccgcattcttaaagctgctgctgaccaaaatgacatgcttgtcgagaaaggtgtatcgggcgctggggaagaagacgactctgttgtcgccggtgttgccgctatcctgaaagctcgccacggctccaagtaatatctagccaatctagaggaattccaaatggctcaaaacattatcgcaaaagatcatcagcgtcttagcaactggctgaaagaagaacaaatgggccaccgtggcctgttctacactcgcgaaactctgcctgtcgctgacattgatgttaaaacaactggttctgtcctagacagcactggcaagctggtaactaaggctactatcgccgacgctacctacatcctaattaccgacctgcacgactatgccaacgctcagatgagccacgctgtcgtccttgctcgcggttttgccaagatcggctccaaggctgttatcttcggtgctgacgttgacgacgctgataaagctaccgtctttgaagctttcaaagccaagaacatcttcgccgttgaccagatcgaaggcgcattcgagaacgtcaccttcgcgtaagcgagggtcgttccagtaaataaacactaggagtaactttaaaatggctaacacccgttcctacctaaacgatggtcagttctacattgccgaccagactgaaaacctgcttatcatcccgaacacttggaccctcgtcgagaacatgggcgtcttcacaagtgaaggtgtgactcagaacactgtccagttcgaagagatcgaaactcgctacggtctggttaaggatgccatccgtggaactcgtcaccaagttgctagcgaccaacgtcgtcaactgcgtgccttcgcgattccgcacttcaaccaagacgactacatcactccagaagacattcaaggcaagcgcgctttcggtgctgaccgcgaagaaactctgaacgaggttcgtgctcgtaagctggaaaccatccgtcgcaactgggctaacaccgctgaagttgcttccgttagcgctatcgtaacaggtaagagctacgccccagccggaaccatcgagtacgactggtacgacctgatgggtaaaactcgtaaggttgtcggcttcgacctgaccaaccctaccgctgacgttatgggcaagaccgaagaaatcttcgtccatatgcaagacaacagccaagacggtctgatccgtggtgacttcgttgccctgtgctctcctgagttcttcactgccctgattaaccatccgagcatcaaagagttctacaaagcttaccaagctagtcctcaatactggcgtgaacgtctaaccgctcgcggtctggaccttcgcttccgtgagttctacttcggaaacattcacttcatcgaataccgtggcgttgacccgtacggcaaccgtctgatcccggctggcgatgcttacttcatcccaaccgacagcggtgacctgttcgctcgttacttcggcccgggcagcactttcgatgacctaggaactctgggtaaagaactgtacgctaccgagcgtatggctgaagaccgtcgttcgatcctgatcgaaaccgagtccaacttcatccacgttctacgtcgtccacagatgatcgttcgcggcactgtgaatgcgtaacggctaaggatttaaggtaaggaggtttatttatgcatccgtttgaccaagctgtggttaaggatcctaccgcaagctatgtagatgttaaagcacgtcgtacctttctgcagagcggtcagctggatgatcgtctgaaagcagcactgccgaaagaatacgactgcaccaccgaagcgaccccgaacccgcagcagggtgaaatggttatcccgcgtcgctacctgtctggtaaccacggtccggttaatccggactacgaaccagttgttaccctgtaccgcgacttcgaaaaaatctctgcgaccctgggtaacctgtacgttgcgaccggtaaaccagtgtatgcgacctgcctgctgaacatgctggacaaatgggcgaaagccgacgcgctgctcaactacgatccgaaatctcagagctggtatcaggttgaatggtctgcggcgaccgctgcattcgcgctgtctaccatgatggcggaaccgaacgttgacaccgcgcagcgtgaacgtgttgttaaatggctgaaccgcgttgcgcgtcaccagacctctttcccgggtggtgatacctcttgctgcaacaaccactcttactggcgtggtcaggaagccacgatcatcggtgttatctctaaagacgacgaactgttccgttggggtctgggtcgttacgttcaagcgatgggtctgatcaacgaagacggttcctttgttcacgaaatgacccgtcacgaacagtctctgcactaccagaattacgcgatgctgccgctgactatgattgcggaaaccgcctctcgtcagggtatcgacctctacgcctacaaagaaaacggtcgtgacatccactctgcgcgtaaattcgtttttgcggcggttaaaaacccggacctcatcaagaaatacgcgtctgaacctcaggacacccgtgcgttcaaaccgggtcgtggtgacctgaactggatcgaatatcagcgtgcgcgtttcggtttcgcggacgagctgggtttcatgaccgttccgatcttcgacccgcgtaccggtggctctggtacgctcctcgcgtataaaccacagggcgccgccgcacaagcaccggtgagttgaagacttcagggaggcttcggcctccctttcgtcgtaggagggtaccaaaatggcttacactggtgatccagcaaacaaccctatcgaccgtctacgagagattgtaggggacgtgtgggagcctccgatgctttccgacgaaacctatcaatgggtgttggacaagaacgaaggcaacgaaagacgagccgcacttgaacttatgcgtatgatgctcttccgcctgacaaggggaatgagagaacgcacaggtgatatcgaagtatatggtgctgagtatttcaacaactacttgaaagctcttcagctcattctcaaagacccgaatattgcaatttctttggccgtgccatatgctggcggtatctccaaatcggatatgctggctaatgacctagaccccgacaacgtaacacgggaattctacatcggttttgcaagacgggagaagctttacaaccagtgcaaccccggtcctcaagaccttagcatggggtgtgattatcttggcaagcttcagttttaaaacagatcgccgtcgcctcacatccttgattaagagggtggaggctctagacggaacaacggtagaagttggtttcttccccgaggaccgatatggttctgaaaatggaaacctaccagttgcacaagttgcagcttacaacgaattcggtactactcgcaacccaacccggccattcatggctccaacctttgaagaattcacatctcaattccactacgcaagactaatgaagtccacgttcgagaacgtcctacgcgatggaaggcagacgaatactcttctgaagaaattgggtaaaatggttgcagagcagatgcaagttaacattgacgactatccgggctctaacagtccggcatgggcagcttacaaaggatttaacgatcctctattccatactggaaagatgcttgagtctgtcaagttccaaatccatcggaggcaataatgctctatcctaccttctccatgaccaacttcgtaaagctagatttgattagaagagggcagcccggagacgacggttttggaagacctacccctccagttgagacagtagtaacaatcacagctaacgttcaacctatcgaaaaatcgacagacactcgtatccttccagaggccgacagaagcaaggcttgcttcaaggtgtactccagaggcgaagagattcgacagttaaaggaaggcccgggagggtggagtgccgatagattcatgtgggaaggagagttgtatgaagttatgaaagtcatcaactattcgatgggaatcctaaaccattacaaagcaatttgtatgagagtagagaggaatagcacagcatgatccacacagagctagaaaactccctctatcttatggtcaaagagttgttccccgactggcgtgtaattcaagcttacacgaataatcaggaaccgcaaaccccttatctggctatcgacattaagaggctggatgaactgggaagggaaaatgtctccaatatgagcgatcccattagtccttcgcatggaactattcaagttcaacaggacttcgcagccaaagtcgtattcgaactgattggcaagtatggagagacagcaagtgtctctgacatggcaatggcgattactcgggcaatgcgtactccagcaggacacgccgcccaaagaaagtttaatctatcccttttcaaactccctagcacaagacgagttcctatgctaagagaaacagatatgtacatgttctatcaagttacatgtgaatttggattctctgttatagaaaccacaactcaagagtttgctgctggggctgatattcacggcgtttattacgacgctggtcgcccgggtcacattattgagtcccacatcgacataaacttcgaacactaataggagacaggaatgactgttcttactgatgtaattgacattcagatcagccgtgagactgctgctgtcgcacagacaaacttcaacgttcctctgttcatcgcttctcacacaaacttctcggaacgtgccagagtctacaacagcctgaaaggtgtcgctgaagacttcggagaatccgatccaacatatcttgccgctgttcgctacttcggtcaagctctcaagcctcgcagtctagttatcggacgcagacaagttccttctgctaccgtctctgtcagtgttgttcaggaaggacaaagctacgtccttaccgttaacggactacctgtcagctatgttagccagcaagacgacactgctactctgattgccacaggcctaaaggcagcttatgacgtaactccggtagccggcgtaaccgtcacagacaacgaagacggaactctaaccgtcgcttctaacgaagactggagcctgaaggtttcttctaacctgactatggctgctgctccctctactgaaggttggccggctgctatcacagcagttcaaggagaaaacgacgaatggtatgctctgagcattgacagccacgccgatgatgatatcatggcagtagctactcatatcgagggcaccaagaaagtgtttatcggagccactgctcaggctaacaccaagacttccgcagagaatgacattgcttctcgtctggttgctgccgggttccaacgtacggctctaatttaccatccaaacgctgacgctcaattccctgagtgtgcttgggtaggataccaactgcaagagcaaccgggtagcaacacatggacccataaagctctagctgccgtagatgcttaccgtctaaccccaaccgaatctaccaacctgaagaacaagaacgttaccacgttcgagcgcgttggtggtgtcaaccgtacattcggtggcgctatggccggtggtgaatggatcgacgtaatgattttcgtggactggctggaagcccgcatgaccgagcgtctgtggttccgtatggctaactccaagaaaatcccttacgacgccgttggtgcaacaattctggaatcggaaatcagagcccagcttaacgaaggaattcgtgttggtggtctggctgaagctccggctcctaaagtcttcgtacctgatgttctatccatgtctccgaacatgagagcacagcgtatctttgaaggcattgaatttgaagcccgtctggccggtgccattcacttcgttcacattcgtggaactgtgaccgtctaaggacggtccttcccataaggagattactaaatggctgttcaacgtctagcgacattctctccggctgatgttaccattgttattactcaccctgcaactggtgagagcatggttctcggcggattcagcgaagacagtatcgttaacattgaaagaaacgctgacacttacgtgatgtataccggagccgacaacacatcgactcgcgtctacaacgcctctaagtctgctaccctcactgttagccttcaacaaacttcgccttcgaacgacttcctgactgctctttacaactacgacgacgcccgtcgttcgtctgagggattgttcacaatccacgttaaagacaactctggtcgttccgactacttcagtgatgacgcctatgtcggtgttgttccgggttctaacttctcgaacagcatgcagacacgcgattgggttattcatgcacacaacctgcaaactctaatcggcggtaacgccaagctgagcccgggtgatgcggatactcttcgtaacctaggtgtcacactagaccagcgctggctgtaatatagcgcttatgccacatcgacggggagctgccttaacgggtggctccctttgttgtttctggaggatagaaattgattaccacctactcgccgcgtgacgtggttgtaactctcgctggtatccattccgtgacagggtacgcagagggagagtttatcagaattgtaaaagatattaagcctttcatcaagcacggttcgatggatggtgaaatcgcaagggtctacaacaaagaccaaggctggcgagtagagttgacaatcatgcagtcctcgccgaccaatgatatcctttcgatgctttacaacgtggacattgcaacccgaatgggaaaattcccactgatgattaaggacacgaagggttctacaagcttcctagctctgacagcatgggtggaagacctacctagggtatctttctctggacaactggagacccgcacttggattctagggtgctctgaggtcgccatgaacattggcggaaacgtcgatcaaagtttggtcgagcaagctatcctgctgggaagctctcttctgccagcccttacgcaattcggaggcttctaatggctaacacggtattgacatatagcccatctgatgttaaaattgtcctttgtgggtatgctctcactggtgtagtttctttcgaaatgtcttggctttcgagaccctacacaatggttcgaggaatcagagggcaccacacccgggtcttcaatagagacctttctgcgcagattagaatcgaggttcttcagacttcggtgtctaatgatgcattcttctcgctagtagagcaagaccgaagaacacaatccgcccgaatcaccttgtctgtcaaggatacccacggtagcaccatgatgagcacagacaacgcttatgtcaatggctaccctagcataacattcaccgatggaatcgagaacagggtctggactattgatgttctggactggaccgatggcacggtaggcggaaaccagcaagtcggcttcgacgtgtttggaactgttcaaggcgctcttagctacctcagataaataaggagtatttatgttcggaaaccaacgtactgtcatccacaatgggacagaatacactatcaaccttctgccagcaactcgcggtatcagcgtactgaagcagctaaccagcttgctgggtccatcccttgccaagtatcaagctgaccacgacttctctggagccatgaaagaactgttcgataacatcgacaaggttcctgttgagaatttgatccagaatctgatgctgacagttttcaaaggttcgatggcaatcaatttcgacaccgaattcgctggcaagtatgacctgctgtacgcactcacaaaagacgtgatcgagttcaacttcggctcggttttttctctaatcggtttcgcagaggcaccgacggtataaagaccggggatgggcagtccgagacttcagtcactactgatcgagttcagagtgatcggagggttagggaggcccaccagaagttctcgcagcattgggagatttatgtggctatcactcaccctctcaagctaacgacgtatggggaactgagtacagtcctcactacagaagatttgtacaacatccttgaggttatagacgttcacgatactatcactcaagtggcaaaagaacacgcagaggctgataagaaatgattacagaaaggattgcccagctaactggggaacttaaatttacagtcgattcccggcctctcactgcttttgacaagaagctcgctggggtcgaagcccggctaagagaattctccaagctgacgaacaagcggtttggagttaagctaactctagatacaaaaactctgagagaggagcttgccaaggcagccactcaaagggtagtcttgaagaacatcgcggtagatgctgccgctgttcgtcttatctctgagaagcttcaagaaagactgaatgcaacgccgatcaggttgaagtctgttaggctagaccttagcggtatccgagatcagaaaaacttcgtaaagacggctctcggccagaccaaggtcgatctaccggttgaactgggcttggctcaggctagccgtacgctgtatgaatggaagaagcgcacagagagtcgttttaaaattcatctgaatgcagacattagccgctctaaattgctccagaatgcacgaaacacactaagggatgtgcagggtaggctaaacggtcttgctgtcgctacgcctcaaattaggctgtctgtagaccgtgcccatcttcgtagagagattcaagatgttcttgagcaaatcagacgcgaagtgagaatccgcattgacctagagtcttccatccgaggaggtggtgcaggtggatcgagaggtactgccggccatatccgtcaaggtatgggaatggggattggtagcgagctagccgggtggggacgcgggtttattcccggccttggtggtgcgttcgctattatgcagcttaaccgtgctaaccaagaactgcaaggtcaacgtctggccatgcaagctgtcggtggtggagtacagggtggtcaagagctacaagccaccctccgcgatatctctcagcgtctcggtcttgacgatagagcaataggtagctcctatgttaagatgatggctgccggacaagcatccaacttcgacaaaacacaggttgatggcatcttccaatccatggctgaatatggacgagtgatgggtctggacggggaggctatgaaaggctccttccgtgccgtagagcagatgatgggtaaaggacagatcatgtccgaagaattgaaaggtcagttggccgaaagattccccgctgctgtagctctgatggctaagtctcaagacatgactatcgcagagctaatgaaaaccatggagaaaggggagcttaagagtgatgctctgatcccattcgccagaactctagcggaagaagctcgtaaaggtggcgctctggacgcggctatgcaaggtacagccgctcagcagggccgattccagttcggatggaaccgcactatcgaggccttcgcggctggaggattcgaccgaggaatgagcgacttcttcaagattgctgcccaaggcatgaaagaagcgcttcctctggtaactgcacttggtggcgggttcgaagctcttatgaggcctgtcaacgctctggtcggtattggaggggagcttggttcccagtgggagaacattgccaagcagttcaacatgaccggcacagggctgactcttaccacggctcaaaccctagccttgctgacccctatgggcaggttgatctctgctattagctggggtgcgttggcactggaagacttcattgtcttcttggaaggcggtgattcggtgttcggggacttcttgaacaacaacgtacaagctgccgagacattcgaaaagctagccagtgaatccagtgaactgaagaacaatctcgacggtatcttctctgttgtcccggggctagctgaagcgctcaaaggtctagagttcaatgaaatgctggtcagcacgatgagagaacttgctgccatcatggagttcttcaacagtgttgtagagagattcgcaatagccggcaagtacagggacgctaagattgctgaagccggaggagacagaagtactataatgtcgaacatcgacacgatgtacgctatgttcaatccggaagatgcaaaagacaaggccaccttcatcggtgacaggctagtagctcagaacattgacgcgatccagacagagactcatacccgtgcaacccagtccttgactccagaccagtttgggtatatgatgcaacgtggtcaagttagaaacgaaatggagggtgccctcaagaagagtgccattgacattagtttcaacctcaatgtttctggtatcgatgctcagggtaacgtcatgacaactgaagcgcaagagcgagtacgagagatcgttagtaacgttcttgaggaagaaatctccagagcttcggcaagttataaggaatcccaatgacaattgctatcaaaagagagaacggagacctaatctggttcgacgctgttacagagttcggaagacagtaccgtggctctgtgagttccaacccaatcgaaacgggaggaaaaatcacagaccacattactacagaaaacccagtcttcactcttacagccgtcgtatcagacgcagacttcaacttgaacaggcccgttatcaacgacaacgaggcccagacatacaagatcaacaacaaagagttcgtgaatacgcagccggtaaccatcccggctgttatctcaacctctagactagaccctagcagaatctttccagaagttatcactcagtttattcctcctgagattccttctgcaactgtcctccctcaaaagggtgataaagtcgcttatgatattgagcgccaactgatcgacatgcagcgtaatgctgaggtcttcagtttgctggacttccgagacggtatcatctgggatcaaatcgaaagatgcatcttcaccgacttgtctttcactgaaaacgccgagacaggtagcagccttcaacctcgtatgacaatcgaggctgtgacattcacagatactcgttatgtcgaggtgagggttaacaagggtagaaagaccgctaagaaagaaaagagagacaccaaagaaggtgataccggggctagcaatgctaccagccaagactctcctacattcaagcgtagtcaaatgaaagaggctcagattagaactcaggttgcgaggtagactaaatgagcacgacttatatcgacacacttcctctctaccaagaccggaagtacagatacgcagtagctatcgagggaatctcaagagtccttcaattctactggaatagccgctctcggcagtggcacatggatatattcgacgaggaacttaaccctatcctgacaggactggcggttgttcctcagtatccgatcatggcagactacgccatgcaacatataggtttcaatggctacttcctactgatgcctgtcaacctagaacaggtacagtataagcacgatgcaagtgacattgtaccacagtttttcgaactgctatacgtgaacgttgacttggaggatgacgtagagtgaaacaatatgacagagtgtataaactaacgctcggtaacactgaatccgggcaaggtgtagagattacaaacctccaccctgacggaagtttgaacagagagggacttcagttccggtttgatatctctaaaagttcagataacaagaagagcggaaactcggcgactgttgagatatacaatctgtctattgccactctgaacattcttgaaactgagtatctgacgtgccgactagaagttggttataaggaaatgggaacttctgttgtgcttgatggcaacgtggttgaaacttcgactagaaagagtggtaacgattatgtcactcagcttattctaggtgaaggatatacagcactaacagagaccaagctgaagggcacagtatctccgggcaaaactgtaaaggatgttatcgaagaaattcgtcttcaaatgccgggagtggacagaggagcttatacaggcctcaattgcaacaacccgatcatgtatggataccaactacgtggactggctaaagacgcactaaacagtgtgtgtgaagccaacaatattgaatggaacatcagtggaaacgttctaaacgtcacagacgttaacggcccaacaacgaagagtgttcaaatggctcctctcgtaaacagagagaccggcctgattgatatcccattctacgccagtgccagcggaacagcacagaagaaagaccagcggagacggaggggcgttcaattcaaatgccttctcaaccctgagctaactcccggggttcttgtccgggtagagtcggacagattgtcaggcactttcagaatcaacaacgtccgaatctcgggcggatacagagacaacgaatggtacactgaatgctggtgttccgatcttaaccaagaggatattgaccaatgaggagaacaggcctacaagagcttctgaacctgcactcgtccacagagggttcgaagcagtacactgccataccttgtgtggtattgcgcgttctggacgattttagacgcctatctgtcgatgttagaccagtggtcaacgacctgtacaaagacggcacatcggaagagcaaccagagattctatctgtccctgtcattatgccgggaacagctaacacacttatcagcttcccattgaatgttggggatacggtgttgtgtgtattctctcaaagaactatggacgtgtttaaaggctctgccactggacagccacacactccaaacgatcttcgtaagttcaacatggcggatgccattgccattcccgggctgttcaccttccctaggtcgatgaacgaccctgcaagacatagttggccacatgataccaaagaccttactattgcccacaacctgatgacgggacaagaggcggaagttaggatcaaagccaatggagatattctaatcaacagccgcaagactataagcattaatgctcaaaatgtcaacgtcaagtgtgcttcactcactgtcgatgcagcccatacaacatggaacgggaacattgcacatacaggtaactacgtgcagactggtggaacttctacattcaacggtattccattccacactcacaaacacggtggtgttatgccgggcggcggtgttactgctgtcccacaagcttaaaggagatcatatggacttgtttgtcaaccccgacacacatgacttggtttttataaatggtgaagctccagtcactcaacgaatggttgatattgttgctcagcgactaaagatcaaactgtacacattcctaggtgagtggttcttggatgataggatcggcatcccctacttcgagaggattcttggtaagtctaggagccttcccgctgttgacgcgatattccaatctgagattatgagagaccccggcgtccttgagattacatcttggcagtcggggatcgaccctcacacacgtgaatactccatggagttcacagtcagaaccacagacaatacagaatcccttcccatcactttcagaatgataggagtttaatatggctggaattacagcagaaggtctaacgattaaagacttggaccaaatcctgacagactacagaaacgtagcctctcaggtcttcgccgacctagtttcaactggagacgaagttgacacgtctggtaactctgctctaggccgtctgatcggcgtagttgctccatcggacgaagctatctgggaagttatccagatggtgtataactccttcaacccggcagccgcaactggcgtggctctggataacctagtatccttctcggcaattagccggcatgctgcacgtccgacccgggctcaggttgttctagagggcaacatcaacaccgttattaactcgcctcccgcgaagatgatttccagcagtacaggccgagtgttccacctactacaaggcgtgatcctcactcctaaagcttgctctggtgttggaatcttccctcagacagtaggcaacgacctgacgtacgagcttaagatgtacgttgatgacattaacacaacgtctatcaagtacacaagtcctgccactggcacagtaacatccgagtccatcctagcaggactggccgccgacgtagctacaaatcacggaaataccttgacaagctacgaacagaatggtatacttttcatagtacctattgacccatttaacaccaagactttcgaagaagcctccaacctgagtattcagaaggttagaaagcttggtatcgctgttgacgacgttattggccctgtgcctcagcaagctctagctatcgatacgatctccattcctattgccggatgggacagcgttatcaaccctgttccagctatcactggccgtctgcgtgagaccgacgatgagcttcgcgagagattccgaaactctaaattcgtacaagccaccaacattctggagtccctaatcgacgggctgatgaacgtagaaggagtcgaggatgttaggattatcgaaaacgatacagacaacccagacccagttcatggagtcccgggtcactcgttccttccaatcgttcttggcggtattcctacagaggttgcacagtctatttggctgaacaagccattcgggattggctctgttggagatacagaggttcaggtggtagacagtcggggatatacccatagagtcaactaccagcgccctgtcgaggttccaatcgagatcaagatcagtgtaacaaacacaggatcgatgccagagaacattgaagatatcctacggccaaggattgtagcgtacgggaccgagaattacaagatcggagacgatgtaatttattctcgattctatgctccaatcatggaaatcccgggcttccaagttaacagcctgacgattgccaagaaaggacaaactcaaggcatggcgaacattgaaatcgggttcaaagaagtggctacattcgccgcagcagatatcaccgtaactacggtgtaatgatagaaggagaattccatggctgtcaaccaatttgacagagaagattatctggaggtggcccgggaacgggtcactgaacagtttaaagagaagccgatctttgatcgcttcctgcaagtgctattgtctggcaagtttgatatccagaatgcactggaagacctccagactctccggtctctggacacagccaccgggaagcaactggacattatcggagacattgtagggcgaccacgcggtctagtgtaccaagatattttcaactattttggattcgctggaacggagcgtgcaggttctttcggaagcctgtcggaccctacggtcggtgctccatggtactcggtcggtgctccaactggtaacgccagagagccgagcgacgaagagtatcggatgatcctgaaagcaaagatcatcaagaacagaacaaactcaaccccagagcaagttatcgaagcttataaatttgtattcggggttcctgaagtattcctagaggagtacgctcccgctgctgtccgtatcggcatcggtaagattctaacgaacgtagagcgtagtcttctattcgacctaggtggtgcaggtgcattgcttcctaagactatcggggttaactacacatacactgagttccaagctggccgggtatttgctacagaaggcttccccggaggacaaggcgttggagacctaaacgatcccactgttggtggaattctgaccaacctagtgacataaggagttataaatggctgattacagtcaactacctattgaaaatatttggtccacaggcggggatatggtagccccgacccctgcgcagcagcaaggcggatggggtattcagtcggttcctcgccaatggtggaactggaagtggaaccttcacgatactaacctagcgtatttgctacagaagggcatcccagagtggactagtacacaagagtacattgctaacaaatcgttctgcactagaggtggatttgtttacaaggctgttcgtacgcatacaggaagcgaccctgcacaagttagtgccaactgggttcgagcttttgcagattacaccacatctagctctgcacttggaagcctgacaccaagagagggtggaatcccattcttcattagcgctacaggagctagcgtgtttgactctacggcctatggtcgcggaatgttgaatgtagctaatgcctccgcagctagaagctacatttcggctcaagaaagctctgttgtactgtccaacctgtccactgtgactagggctgccaacacggttccgtacttcaacacggatacctccatggctaccttcaacatcacagcgttcggaagaggacttgtcaacgcggctaatgatgaaaacgcaagaaatttcctaggactagctaactctgctatcattacggcagacccagctaacagggcacatactctggtctatagagatgctgctggcaacttcaacgctggcgtaatcactgctaccctgtctggaaacgcaactacagctaacaagcttagaaccccagttacaatcaacggtgtggcgtttgacggaagccaaaacattgttcttccgggcctagatacaagttatgcgggaacggttgcacgtcttcacatcaacggagcgaacctttcgagtgcagataagactactcagctagcactgaggaacaaatctgacaacgactggattagccttgctgtagtggatgacaacattctccagtttgtattcagaagcgctacaaacccagttgtacagattggcaacgaagttatccttcacacaggaaaccagttctctctgggcccgactcttacagacgctaggtctcgtctgggtctcgacagactaactcaaggtagctctgatactcaagtcttccccagcaccttgaacaatggcccctacttgaccgtacaacctacggctatcggaggattcaacggtagcactaacggatggctgttccgattcgacgctaatggtaacatgactcatggtacagttcctgccgctagaatcactggtctgtccaactcggctcagattccagccacaactacggcgcaggctaactctcttgttcagagagacgcagacggaggattcagcgctattgcgattaatgcgtatggcactatcgtcgggtacggctctaacatcttcagtagagcatcgggcactggcaacgcccacatcgggttccagagagcgaacggaacagaactcggtcttatctggggagcccaatctaacaactcgatgaacttccgagttgctggcggagccaccgcagtgtcgattaccggtctggacatgactgttactggaagagtcaatgctaccacactaaacgcctctggaaacgtgaatgcgacaggcaacgttaacgccgggagcgctacgctcaatacagcagggaatatcacaggagccgcttacggagcctatggttctctgaccaactgggttgattcggtatatgccaagaagggagaaattcctaacgatatcgcaagagccggagccgcttgggacgctgtaggtcagtatattctggcgggagatcaatctggagggtctggtggaccggggacaactagagctggaagccagttgaagccttattcgactattagctacacagcaggggcactaccagcagcaggcacttacagatgtatgggagcgtttgcaggtggtggtaaccagattaccctgtggcagagaatttcttaatagagggcttcggccctccttttagaggagattatagtggaattcagaaatgttgtaaaatacaaaatggggttcgaatgcgaggtaaatcatcctcagtggggatggattccgttctacgcttgtgattacgacgatagagccaaactggtatatgacgccatcgcccgtgctgtcgataacggagaaatccccgaaccaaaggacgttacagatagagacctcgttgtagatgcacgtctgtggagagataatgagctaacccgggctgatcgtcaagtagaaattgctatcgacgatgaagacgaagtaaaagagaaggcttggcgtaagtaccgctctgcactacgtaagtggcctgagcataaaaacttcccagccgagaagagtaaacccaaagctccgaaggagtgaggtaagataatatgccaaacattatgaagcctacgggaatcaacgctatctggtctgaaaatggccagaaggttgacccgggtgctgtgaaagtagggctaggctgggttacggaacttcctccgtaccagactgcaaacttcattgaatataaacaagacctgtttaacgctcacgtcaaccaacatggtatccctgaatgggatagcgtgacagagtatcagggtaacctgagctacactcaaggcgctaacgggatcatctataagtgccttagaacccattccgacaagattccaactgaccctctgaacattacagccggatattggcgagtggcgtttgaggatgcgggagaggcagctaaggttcaagccaaccttgatcggcatgtaacaaactacaacaccctctctgggattggcaacgtagttattgcaagacaaaacctaagtgtgtatagtaaagctgaaggcgacgcccggtacgctatgaagcacgggaacggctctaatgttttcagcgtcgccactgccacacagccaactcacgcgatcccgctgagccagctatcgactctcgttcctcctgcgaccgagactgtagccggggttatggcagttgctacgactatcgagacagaagctggagccaatgataccaaggctgtgagtccgctcaaggccgcacaggtgtatctgaagaagaaagacaacctttccggtctgtctaacgtcactgccgcaagagctaatctaggactgtcggatacagcgactatgccttcttctacattcctgaaggcaggtagcaatctggcagatgtgcctaacaaggcgctggcaagatcgaatcttggaattacaagtagtgctacccagccggaaacctatttcttgaggagcgctcagaacctagcagatgtacctaacaaggcacaagctagagtcaacctaggcctcactgggatggctacaacagaccctgcggcggttatgatgaaggcagacaaccttgctggattggctaacactgctaccgctcggtccaacctagggctaggcacagcttctactagaaatacaggagacttcctgtcgtctggggataacctgtccgacctcacgaatgtccaagcagctagaaacaacctagggttgaagggagcggctacgctcgatgtatggggtcttcctgcgaatacaactgccatggacttccagtctaatcagtcggatatttccagaggatgggctcgactaccaaacggccttctgctacaatggggaactggtcccggtctatctgatgacacaaggacgaatatccaactccctgttccagcacgaatcttgaacgttcaagtgaccgtaatggggacgtttaacaactccatcggcccgggcgctttcatgacggatatgtggagcaacaccgggtttagagttagctgcaactggggcaactggtcttacccgttcaactggtttgctatcacttccaccctgtaattcaggagtatcaaaaatggctctaactgagcaagacttccaatcggctgccgatgatctcggagtcgatgttgccagtgtaaaggccgtcactaaagtagagagtcgtgggagcggctttctactttctggcgtccctaagattctattcgaaaggcactggatgttcaagcttctcaaaaggaagctaggtcgtgaccctgaaataaacgacgtttgcaaccctaaagctggaggatacctcggcggacaagcggagcacgaacgtctagataaagcagtcaaaatggatagagactgcgcacttcaaagtgcctcttggggcctattccagattatgggattccattgggaggcactaggttatgcgagtgttcaggcatttgtcaatgcccagtacgctagcgagggatcgcaactaaacacttttgtgcgcttcatcaagaccaacccggcaattcacaaagctttaaagtctaaggactgggcagaattcgcaagaaggtataacgggccggattacaagaaaaacaactacgatgttaagctagcagaagcctatcaatccttcaagtaaatctaggaaggttcctaatgaagaagctattcaaaagctggaagttctgggctgctgtaggctctgcaacttttatggctctggaagccatggttcatctttgggagcctatccttcctcccggcgtgttcgccgcagtagccacactggtagctgttggtgtgagaatttcggcagtgtttgtaactgctggtaaagtggaggaagcgatttcggaaaccatggaacatgacaccatagaagatggctcaatagaaaatgatactaactaaactcaaaaactacgccctcgtagtagctgccgcaatggcagcagggtttggatatctgtcgttctctttgtacggcgacttagctgttgcgaagaatgatatccaatctcttcaagctgcgtctcgacagatggaagagcagttccagaaagagcgagcagggtgtgagatcaccactgggagactagaggcgcatatagtccaaatgaagagccgacaggagcttctacaaggccacctgtgcgagcttgagtctctacctaacccaaccccaagggagacccaagaaaatgccacagagacgatctctgagccttctactggggatagtctggaccctgctcttacaagcttgctcgacagggccttctgttccgcagtaccaaacgatccttattgtgcccccggcaagcctgaccgaggaggttaaggtataccgagtggagcaagatacagtcaaggggctcgctagagcttacattctaaatactaacagtgctgccatgtgcaatagtcaactacagacaataaagctatgggcagaagagcagagggctctatatggaaagtaaagacggcaaagaaggcctaatcaaggtagctacacagggagttatctctctgctaattgctatcctaatggcttggtctggattcctaagttccagtctttctaagcaggaagaacgtatctttgcgatgcaaagagatatggtatccgaggcaaaacttaacgcactagagtcgagattcaatagccgacttgaaagtgaaattagtaacgtaagaagagaacaacaagaaaccaaccggtatttgattttgattatgaatgccgtcaagggtcgggatacagaaactcaataactataacccgttaacccacactgggagacaatataatgacaaggaaacaagactggccgctagtttcagcagtcggggctttgtttatctccctccttgtctgtatggctattctggctttcacagcgatgactcccgaggctcggtttgactctgtacgccagacctacgagattcgaattagcgaatctgagcggcggtatgaactcaaactgaacagactacaggatcagataaactcggcctcgtacacacaggatcggcaatcccgtttgcaatatgaagaactcgactcgcttaaaaggaagattagcgaacttgagcggagaataaaagaaaaacaagaataattaagccccgggagcgaaagcttaccggggctctttgtcatgggttttcagcgaacaacttgataaacttcatcgaacaggtcatcaagcttctggataaccttcttagccagcttcttgcgaactttgttagcctctgggctggaatggagtagcttaatatcggacgcgttgccccagtccatcgccccgttgtcgaacagcactttaacattcagatgcatcgagccctcgtcaatatcgacaactacgccggtcatccgagcgttggtcttttcgaaggtcggcctcggaatgtctatgtccagactgccaaccataacaacctgccctttcttaacgtcaaataattccatttaaaacctccttaatctaacttcattagtgtgttgaactgatgcctcagagacttaaaagcctgtggcccatcgtcttccgctccttcatgaatatgatgagcgattaagtgtatcaatcctcggtctcctagtaacaaagaactaggaatttcttttatccaagccacaaagcaacagaagtgtagaacctccggcatggaagccttgaagctggaatcatccagcttcgataggcgttcatacgtagctttaagatcgggatagcttaactgatatgtagcatcttcgtcaatatgctggtcccctctaactacatactgcaagctcatattacaccttctttccgccttctgcaagacgtgcctctcgcttatggtcggaacgggtcatattgtactcgatcttctcgatgatcgcacctgcaacatctagacctcgaacattcgcgtagtccatgatacgaatgatagcgtcagccagttccacctcttccatcttccgctctggcaagtgatcgtccatcaaatccttacggactccttcagccgcttcggcgatttcagtggtaacgagcatcagcatgtgcagagcatcacgtttaatcggctcgcctgtgaccagatcggtgttccacttgcggttaacaacctcaaggccagtcatcattttgttaaaaccgctaacaaactcgaagacggactctcgttcgaatagttcaccgaacgttggctcttgatcttcgacaattgcagtgtggaaaggccactccatccaagcgtcatagcactttttgataagctcttgttcgtcaatgtatgagaagaaatcttcatatccatcaatcgcattaacaacttcagttcccctttcccaattgcgcttatcaataagtctctggtcgattcgcagggaagtgctgccaacttcttcccatgatctccagcctactatgccatcgccgaagtacaacagaatgggcagattgaatccgcgttcttcctgatccttagtctccatagctataacaaacgccggtactttttctccacttacgccattggccaagacgaaagaacccaagtgggtggtctctcggctagctgggcgatgagcttcctcgatatgatctttaactctactcattaacttcaccctcctcgcagaacatttcaaaataacaatcgacacaagttagcatgccgtcgtcgcttacaacctcctcgggagggaagttgttcccgcaacattcgcacacaactcgatcaacctccctgcatccccagtaagccatatttactcctccttcagaagatactcattgctaataactttgaagctgaagtctcggctcatgcttttgaaaaccaagccttcccggtacttaccgttcaacgcagactcgccactagccattttaattacgagttgcatgtcttttggaacgcctacgtcccacatgtacaccggcacatgtttgaccgtctcaccacccaactggttcagcgtattcagaatggcaagacgctccgctggaagacagtaacgactgtccgaaatgttgtagatatcgtacacatagtattccggtttgtcaactccctcgaagttgccttgaatatttggtgcaaccagttcgccttgaagggcaatattcagaccgaaataccggagacgttcaccaagattaagctcttctgccatcgcagtgaagtgattggagtctttcttaatcacacgcttccagccccgacccttgaagaagttcttgatagcagtgaagaacccgatcttctcgtcttctagacggaaaccgacatttcgagacgccacgcctacttctccgtccttgtgccagatagtgagagacgaaccgtccaatttgaatgtcacttcaaacttctcgcccttctgatgagcctgatcgtaagccatctgaatattttgtacgcgagcctgatccgtcttcgggatgaagttggggaaccctagcttggaagtgccagtccggctgcccttgttgcctccattgatagctgcctgctcggaaggctttacatacttcaggatgcccattcgatcggtaacatcttcgtctactttcggctctgggctgcccgctgcatgaacaggtacgatcaggccttgactaagctctttacgaagcttcatggtcttgattcgagaatactcttttccaccttgttcgaccatattacggcctcgcaggaattcaaagatagggttatctacaggcaccatggaatccacttcaatgtagattgccagatcaccagcctgatattcccctcgtttgattacgcactgccaaccaccaacaagcgccagatcgaggctgtcagcgttaggatgggtcttcacatcgtcgatacgcaccactcgggctagtacgcggtcttgggaattactcatatattatcctccttgtttgaaaattggtatattacttgttaaaccagccgagatcaatagcccgctctagggccagtagcagattctcagcatctagaaggtcacggatcgcgatccaactaccactgtctcccggtagaccgtctgtgatatacacaggtatgtcactgtattcgctctttttaagcccgcaggcacaggctacattgtccccgaagacaatctcgctgacttcccttgcctcgtctcgaatatcgatcttcacacctaccctcctgttgtgttgaaagttgttgtattctgcccggatatcttcgcagtgtcaatagccttgacaagaaaataatccgtgatagagtgaggtctctgctggagagaaatgtccacgtcactcaccggccagcagtatagcgtatgaagaggaaagctgcaagcgcaacctgagtcgaatctgagaacagggcagcgacgacccgaaaggggaaagctcagagcctataaggaacccatgttccccgctcaccgactcatctgcatatatgtatatctgcatgagagcgagaggtagaccaaaggcatgtcttaggcggagattccgtatggcaagccttgggacaggtctgcctccactaccgatctatctgcataaagggggtacaatgtattcagcaactgttgtgaacagacactacgagaaatttgatgtgtatataggaagggggagcaagtggggtaaccccttctcccacaaggaaggcaccagagccctctacaaagtagatacagtggaacaagcaattgagtgcttccgaagtcatctttggcgtaacataatggaaggattaatcacagttgatgaccttctggagcttgacgggaagagattggggtgttattgtaagccccgtccttgccacggcgatgttctggtgagggcaatcgaatgggccaaacaacacagaggagtgtataaatgaaacatgttatttaccgagaagacctaatcgacctgttacgcgaccgtatgaagctccaagcgctggaggctggtggcgttgacaactgggactggtatgaggcctcgcttatcgactgcggattcttcgatgatgacgggcgtgagcttgaggtcgaagcacttgcagattgcttcccaaccgtaggtgcgtaaccgtggaggagtcgaaagctaccttcaaagacccttaccctaggttcttcgacgcttctcgtaggtatggcgaaaccaacgactgcatggtggtgagctttgcagtcgtatggaacaccacctatgaaaaggcacaccagcacctgaaagtgaagtgcaagcgcggttaccggcaaggggctactcagaagcgcttcagctacgcagacacttggtgccctaagacccggatgctctaccgggaggatgctaaggataagactcttaggcagtttgctgaggaaaaccctgaaggtcggttctggatcgcggtaaagggtcacgctattgcaatcatcgacggagtgttgtacgatcacactaatgacaaaagacgcaccatctggcactgctggcaagtgtggcccggggaggcacctgagaaaatcgagaggaagcctgatccaatctcacctcctgtgagaaaggccccagattggtatgtctgaagattacaactgaggaggaattatggaaattatttcgagagggacgctccctcaagaggttttgtttacggctaagtgccaccactgcttgagcattctccgggctaagaggtcggaacttaagtatgtttcgttctcattcggacgccccggggagactgggtattatttcgcagagtgccctgtgtgtaacgaagaggtgtctgcttgggttgtggttcctaccagccctgtagcacctcctcccactgtagagtatatcacaaaggagcgtaaataatatggaccagttagcaggattcatgggcgaacctttcgtaattgcgttcgactacgacgagacgatcagtctctaccctcttgccttccgaatcgtcatggataccttcaggggctttggaggcgctttcaatgtgatcgtagtcactgcacgccaccctgacaacagcggagagttagagtggctacgggactacgggttcccgatctatttcacggcacagaaggcaaagcgaccattcatggaaaatcttggaataaaagtctctgtatgggttgacgacaacccgttcagcgtggataatgaccttcctccgtggacagcggagcaatacgacgcctaccttgaggcaaagaagcaacgagctatcaacagagggagtaaagcatgagcgagattattaaggttgaagtgggagatcgggtggtccttaaggcctattgcgatacatacactggatgtgcaaagcgatgggcgcaggcgcatggtcgtttgcatgaactgctagctacggggtttgtagaagacagttgggtccacaccgacgaactggccggaggcttgaaaggcaccgttgtgatgactgaactgggactgaaggaagagtgctgtgcagtacgtctagacgcctacactgaccacagggctgttgtagttgttgacgcttctgatctttacatcgcatgtaaggcagcaaaagctcccgtaagcaccctagacgaggccttcggttgcgaccacgactaccttatggaatctccggctaacgctcagcgactgaatgagtccgtcgagcagctacgaactggccaagtcgtagaagtggacgtgcctatgagtgtaaagcaagacgaaactccacctgtcgtagtgcatgtagtagagaagatttacgataggaaaggtaacgtacacctcattctacagtatgaggtagcaggggcgctaatcaggacggtggttgaacagggagaactcatttacttcttggatgaaatgcaaggtatgtacttgaccaagattcaattggaggtgaacaatggagttgtatgaccagtggcgtaagtatatgagcgtcgtaatcttagaagaagaagataatgagcgtcagtgcatgcggcttattgaggcagttggcgaactcgatccctatatccaagatttcctagattctttctctattaaaactgaaggaggtgtgtaagcatgagtcagagtaagcgcgatgagattgtagttgaagcacgtgggctagagagctacttcatttcccactggaacggctgggatgtgatggacactgcttgtctcggattttatatcaaacctgagtatgttcttgacccggatattcgagagcttgagcctagcttcttggagcttgatttcgagcgttgccgtttccgattctggggaaatgaagacgaaggcgtggacggcaaactcatggagggcaagttgcagattatgaccaactccttcgagtacgtcttcttcaaggaggtttgagtggctagacagacttacgagtctgcatcagatagggcggtcgaggaggccgtccgttctgagcttgaagggcggtggaagtgttctcttcataagctacctagagcccactatatggattgggcagcctgccggaatggaaaggttgttagctttgtggagcttaaggctcggaataatgaaatgcagaaatatcccgacttctttgtgtcccagatgaagtggctccatgggatcgaaatgcaaagggtgtttgacattcccgcattccttgtggtaaagtggacggactatacaggatatgtcaaaatgacagccaacggcgtcaactacatgagcatgggtggcaggattgaccgtggagactggcaagaccaagaagttatggtccatatcccgctgaaagacttcacacgtttataggaggacacatgaagagactctgctaccgttgcatgcatcttggagagcctgtcatgctccgtcataagacgggtatctggtacaagggttgtagtaaatgtggatcaggagtattctatggctaagaagaaccctgtattcaagtttctgaatacagtaaacaagccctcagtggagagggataaaaccaaatacaggcggaagcctaagcataaacagaaggagcgattaaatgaagaagggtgataaagtgaggatcaatgatgatgctgataccatcttccggggccgtgttgccactatcatcgcagtagacgaagagggttgcgttatcgacgttgggagttacgaggatgagagcggagagctgatcgagtaccttcacctattctttgagcgttctgagttgtccaagcaggcgtaggagtgtataatgaacggacccgagtgtagatggtgcggagagaaaactgaagctgagttcgtagacgttgggcttggatggacgcagcaagtcactggaggcatgtgtcaccagtgtggagggtacgagaacggttactaccagaacgacggaaggctcacagaggtcgagtttgccacctactggagtggtccgttcgaagattatgcggatttctcgccattcaatcatatgagagaaggcgactcgccatgaaggctacactgagaaaccacaatctgctatacatctacttccacacgttctcggaaatgaatgagtggttgacagagaacgctgtagatcagtggacagtcactactctgggctccggctatcaggtggctgttcctatggaccgtgcaatgcgggaccaatacgtctcggaggggggttgacacgaacacaaggtgatgctaaactccgtggttgtctgaagtaaggaggttttatgtccaaaatgaccgtggcccaaattgcggctatgcacggtatcgatctgtattctgaccacaagaccgcttgtccccaatgccggaagaaaggcgctgacaacagcggagacaacctaaaggtctatggtactgatcgtaataccggggaacacaaaggtgcctattgttgggcgtgtgggtacaccttgctctctgaagagcaggaaagagacgcccggggagaagacgaagaggagtggaatttcgtgggaactgaatttaacgcagagatcaacgctcaaattaaagagcaatgctcgtatgatccgcgtggttatcgtggcctgtccaaggaaacttgccagtatttcggagtgctacatggtttcgacccggagactggcgagattgcaactcagctatatcctactactactaattatgaactcactggctacaaacagcggatcatgccgaagaacttctcagagcctatcggcgagaccgggaaggattgcgagctttttggtcagttcaggttcaagaatagcaacagcaagaaggtgcttattgtaggcggtgaggttgaccagctatcagcattccagatgctcaaggagtatgatgaccggcgagcaggcggtaagagtgattatgaaccgactccagtggtcagccctactatcggtgagagtggggcgtggaaacagctacaggctcagtacgagtggctagaccgattcgaacaaatcatcctctgtttcgacagtgatgatgcaggacgagaggcagcagacaaggcagccgataagcttccgaagggcaaggtgttcatgatggaaatgaaccgtaaagaccctaacgagtatttgaaagctggccgtcagtcggagtttgtcagtgcattctatcgagcccgtacatggacccctagcggtattgtagggtctgatgcactcgacgctcgaatgtatgaagctgtgcaggttgagaagattcctctgccaccgttcgctaagaagctccagaaggctatggcaggaggcatcccgttgggccggattgtgaatatcggcgctgcatcgggcatgggtaaatctactgtagtggatgagttcactctgttttggatttataactcgcctcatatgccgggtactgtgactctggaatcggactgcggggagtacgcaatcaagctgctgagccgtaaggtaggcgagaaggcagacttgtacgagaccgttgaagagaaagtggcgttccttgatcggcaccgtgacgctcggtacgacttgtggcacaaggaagacggaagcccacgcttctatctgatcgatgaccgagacggaagcctagcagccctcaaggctcaaatcgaacaactgattattcagtttgagtgccgtgttattattctggacccgcttcaggatattctggacggattgagcaacgaagagcagtcggtattcatgcgctggcaaaagggtatgaccaagagccaccgagtgacgttcatcaacatcaaccacgtccgtaagagtggtggtggtcagaaggctaactcggcaggtgctgaactgtacgaagaagatttccaagggtcttcgtccatcttcaaatctggtgcagctaacattctgatgtggcggaacaaggacgcggagaacgagttcgaaaagaacctgattaacgtgaagctctctaagtgccgatggactggccgcactggaatgatgggcaattggtactacgacgttgagactcatacaatctgggacttggacgactatctggaccgataccctgacaagcgccgtgaacacgaggcttggatggctcagaaggaagaggaaggccgggacacggaatactaaggttgacagaggggtgatgcttatgtatcatccctttcgtcgtttacaggaggaaaggaaatgcaacaacgatttgaaacaatcgagcaatacctcgaatggatgggaaataacaatttcaccaacatgacttgggatatcgaggccacaggcctgttggatgaaacgtctatcgattacactgccagcccctacaagattaagcctagctacaaacaccactgcattgtagtggaggagcacggtggcaatattctggcattctacgatgggccgacctacgtctttgacgggcgagagtacactgagagactgccgaaagcgtcttccatgctccacactgaagaagttgtgactctcaaggactacactccggtagagtatattcacctgccgctgaaagagttcaagaactatgtgctcaagcgcaagatcaagcgcgtagtggctcacaacatgattaacttcgaccttatgtcgatgaagcttgtggaagatatggacttcactatcggcgtagagcacagggatggcggtctgactacgtggtctgctgacacttggatgggcaagcaagtggtattcgacgataccctcgttatctccaagacttgtaaccctgacctgttcggcggtcacagtctggataagctgtctcgtcgtgcaggtggtgacaccaagattgacttccgtaagcatttggcaccggatgttcgattcctcgacttcgcagccgatatgctctactactgtatctatgacgtaaaggcgaacaccgctgtatggcattggttgcaggaccacgaagattaccaactgtccgaccgtgacaactacatcaagaattggctgtccccgattcagttggagaagaaggttgcagagatcatcacctatcaggagcaccgagggtttgttctgaatgttgatctctgtgaaaaagctgtgaaagacttggacgccaagatggaagagcgtcgggcccgggtagagcctgtgcttcctcctcgaccagctaccaagaaattcatggcagactacacaccgcctaagcggcagttcaagcagaacggggagatcaccagctacttgcagaagtttattgagcggattggggctcagttgaaagagggtgacgaccggacgatgatcttcgaaggcaaggagtacaagcttccgcttcccgctgacgtaccgctgaagacggaaatgcctgctaagatcggggacacaactcacatcaagcaatggcttatgggtgagtttggttggattccatcagagtggaaagagactgatctgactgtggatcagaagaagatcaagcttccgatggaaaacatcgttgctaagatcgatcgctggctggatgtaacgtatagcacagcgtacaaggaagagcggctggacgggttcggggattacatgaagatcacccctcgtagcacccgcgcgtatgtacgtcagaggttgattgatcgtgcaagcaaggggagctgtaaggttctcactaaccctagcttcacaaagggccaagagaaagaaatgtgtccagacctcgaacgcattgcagaacagtttccgttcgcgaaggatgtgattgagtacctgacctttaagcaccggcgaagcgcaatcctcggtggcggcatggactgggacgaaatggaggatggagaggagccggaaaaaggttaccttgcaagcattcgtcaggacggcaggattcccacgcctgctgacacttgcggggctgctactagccggatgaagcaccggaaggttgctaacgttcctcggatcacctcgttgtacggggctgagcttcgagagttgtttggggttggagatgggttcttccaaattggatacgacttcgattccttggaagcacgtaaagagtcggcctactgcgatcagtacgatccgacaaaggaatattgcaaatctcttatgatggagaagccatttgacgttcacacaatgatggctaagcgtatttctgagatcattggtcgtcaatttaaccgatctcctgcgaaaaacgtaaaatacgggtgtacgtacggtgcccaagctggtaaagtggcaaaaaccattggtgccgatttgcaaacgggtcaactggtattcgatgcgttctgggatgcagcattcccattgaaagctctgaaggacgacctcaccaagcaatgggaagccaatggcaagaagtatatcattggagtggacggtcgccgagtccctactcgttcggctcacgctatcctgaacagcttgttccagagtggcggtgttatctgtgctaagcgggctatggtgattcatgatgtactactggagaaagaaggtctgaaggttgactttttcaaagaagactggaagaacaagccggaattctgccaacaaatgatcgcgtaccacgacgaagcgcagttggaagttacagctaagtcggtcagcttcaagatgttcccttggtctcttgtaggcggtaagccagaaggagaaaaggaacaggaggaggcggagaagaagctgaaagctctagctcaggcttacaaggacgaacaattggctagtactggcaaggtgtggagtgatatcgcacactacagcaaaggtgaaggcggggtgtttgtagcttactgccgcgctggagaacttgccacgaaggccgtgagagctgcgggagagttctactctactcctctggtgcctatcgagctgaccgctggctacatcgttggtcgatcttggaaggattgccactaaaactggcattaagcgaggaaaggggcttgacaggcccctccgcctcctatacaatggccacatattcacaacatacaaggagaaacacaatgactctggctttcattatctatctggtaatgaccgtattcccagccttgtcgtcggctggtagctttgccctgatcgtcaccatcatcgcatgggttgcaggagggttcgtttacttggcatccattggtggccgagagaattcggcagttaaagccacactcaaaaatcacctacggcccttgacgttcaagctgtttctgcctatcattgtaatcggccatctggtgccttcgtctgagacggcatggtggatggtcggcgggtacgctgcacagagcctctatcaagcagacgctactcagcaggttctcagcgaatctactgaactgctcgaagctctggttaagcgggctaagaaagaaactctgaaggctgttgaaggcagcagcgagtgatacggtaatcacagaataggaggtatggtatgaacacggctcgactctacgtctacggcaaatcgtccatggtaggaatcactgttgacaacaaggccaatcgggagtactatacctctaaaggcttcgaggtatcggagacaccgttagcccacaaaagcgtggctaacaaatacaaacagaaaggaggtaaataatatgtctggtgttattcccgggactatcgtcaaactcactcaagtgggatgtgacgtcaccgttggctggccaaaggaagcccgatatgtaggcgcatacgcagtcgcagtagatggacgcgatatcggtctcccggaaggggaaatccggttctgctcccttcattggtccattgaccgagacgtcaatgatggacttggagactaccaatcgatgctcgctgacaacgaccgcttcgaaattgtagcagttccgggcaagaagtattacgttaagaacgttgccaagcacagcgcacagatcggccattacttggttccttcggagccagccttgtacgtaggtttcgagccgtgctggctgaagagcatgcacgaaggggagagcccgttctgcatgacttttaaaggacgcgttgacattggcggtgaaacctctgacaagccgcagttccagaccctctaccctgagctggtactggaagagtttaaagaagaggcggagggcaaggttgaagctccggttgacgaagagaagaaagaaaaggttgcaaagcctgctgtaatgggttatgctgttctcgatgcagacgggagtcctcttaaattctgcctcactcgcgaagaagcccgagccaccaagcgctggtggggtggcaaggctgagggagtctcgattgtaaaagtaatcaaaggagaggaggtgcgttaacgcgcttctcctcttgcagaatccgggaatgtccggtatgatcgtcagtcaagtggctgacacactcgcccagtctagggtacttaaataggagaaatgaaatggcttttaaactgaacgtaaccaccaacactcaatccggcaacggcggcgtccgaaaggaagtcgattgggatgctctgaacaaccacgtagttgaagctgctggcactgccgctaaagcgcgttcgatcccgggttatatctccggtatcatcgatctcggcgagcaagagcagaacgatgcagaggttgtgttcactggcactgccgaagatgaaatccaaatcatcaaggaatatccgaacacttacttcaaggatggactggacaagcagactcgcaagcctgtacgtctgaagtgctggccgcagcgcgatatgcaacaaatcgcgatcactgtggacttccctcagatcgaggtagacaagagcctgtacctgaccggtaacagcaacaagtctccgcttcgtgtcctgtacaacggcgactttactctgccgggtcagaagactaagattgttggccgtccgtttaccatcaaggaagtgaagcacccgaatggcaaatgggcgttcgccaagaactccatgttgcacaaacttgctgtggctactggcgtcatcaacgaagacgaactcttcaccaaggaccgcgtaggcgagcttctgggcaaggtggctcagttccaagtgcgagtgtggatgaagccgggcaagaacgatatgaaattcctcactgaggatatcagtctggtcggtatggttcctgaaggtgttccggttcccgagctggacgagaagtacatctacggtgtcaacctgtatggcgagaacgacgaagaagcagtcaagcaactgcgtgctaacgtcatcaacaccatcaagcgagccaagaactacgaaggttcggatatcaaggcgatgatcgaagccgttgaagctgcacgcggtggtaaccgctccagtggcgacagcgaagagcaagctgaagataagccgcagacccaagctgcacctaaagtggagccggttcaaaccaacgtagatgatgacattccgttctaaagggcggtggtaagacaaggggcttcggccccttcctttcaaaatttcaaaggaggcaacacatgcaaatcaattttggtcccatcttccttctcgcagcaatcgtcctgtgcgttctgaaatctgccggagttctcgctatctcttggactgtggcactcatgcccatctggattcctcttgtaattgtattgtcgattctcgtactgtttcttgtaattgtaggtctgatttacgcattcggcgatcgtactaaactgaactttagctttaaaaagcacttccggaataagtgaggactaatgatgagtagtttggttattgttcgagtacctgagtacattctaaaaggccccacagtaaacaaccagttcagcggtgacctgtgggagcgaaatctcttcaaagatttgaagaacgctgcggagtgtatcattaaaggagagccggcttatgttgctcttcctaacaaggtaaaccctgacactctacaaacagagtgggacattcaggttgtacagttctaacccaaggggagcttcggctccctttttcattggagataaaaatgagtgaaaaggaagaggatatcgtcctcatcgacggcgaccttatcgcctttaagtgtgcaagtgtcaacgagacccgctccatcattgtcagaaacaaattgacaggagaagaggaaacttggaagaatcggacgacttggcgggagaataacaaagacgaagagggattcaacgaagacaacttcgaaattgaggaccatcaagaccccaagcacgtgtcctacggtatctctgttgttaagaccatgatcgaccgaatctgccgccaagctgggtgcaagcagttcaagattctcctatcaggccctgataacttccgtgacgccatcccactcccgaaagaatacgagattaccaagggtaaaaagaccttcactcgtggtggcaggtacaagggtaagcgtacagggcagattaagcctcttcagctaggtcagctaaggcagtatatgatcgaagcgtatgacaccatcatccatcccggagaagcggacgacttgatggccgaaatgatgtacaagaacggtgtaagctactccagaggggagactactcagcgcgtgatcggggctaccatcgataaagacgcagacggcactctaggatggctttgtaactacgaacgtgagcctgttcaagtcaagttcatttcaggcctaggatcgctctacagggactctaagggcaaggtgagaggcgagggacgtaagttcttctacttccagcttctattcggagaccctgttgactgctaccgacctgctgacctgtgcatcgggaaggacttcggagaagtggcagcgtttaacatcattaatccctgcacaacggacaaggagtgctggcaagcaatctacgacacctacaaatcgtggtaccctgagcctgtcacttacacagcatgggacgacacagagcacactaaagatgcaatcgatatcatgcaaatgtattgtgactgcgcccacatgcaacgttgggcgggggatcgggtagactgtagggctgttttggctaaactcggggtagacttaggaggtgcagaatgagtgtaaggcctcgcccttgggaagacttcccgggcatctggaagaccgaagccgcgttcttgagttgggtcagaggtggcattcgccgctatctctggtctaagaacccggtcaagcttgagtttgctaaatcccgaaggatcaagatagccaacaccaatgaaaagagcaagctcaggaaccccactgtatggggctatgtgtgcgagcagtgcgggaaggagactcctcaagctaacgttgagattgaccacaagacgggggagttctccctgaagcgagtagaggatatccaagcgttcgtggaaggtgtggtgtttgtccgcataggagatttggctgtcttgtgcaaaccgtgccatgagatcaagacctatgcagagcgttacggactcacccttgaagaggcgggtatcgtaaagcaagctattgcaatccagaagcagaaagggtatgataaggccttcttgcaggaggtgggaatcaaacccgcatccaacgcagagcttagaaaagaacagatcattgaataccttaagtctaagaaggagggtggatgaacgaggatcgggtttacattgtagtaagagacgaggcaccagagtacatggtgccgactctggttgcacatagcatcctaggggcagacatggcaatggttctcctcggacaggaccgggccgttccatcgacggaccttccgtcccgtccgtatatgcatgcagcggcaaaaaccgccattaagtgggtggagtggaaacagtggagcttccgtaagatcgttgtacgagtttctgacaaagagtacgataagatcaagcaaatccctttcgtatatgaggggtatgagagaaccatctgcaatggcgaaggctcctgcctagtagtacctcctctgagcaaagaggagaccccgaatgttcttaaatttgcaaaattatggaggcctctgtgagagagaagtttttgagaattatgcggaagctgcccatccgggtaagggcttcccttgttatggcttggattgctctgttcttctggctcccggttgcaactgcgctaatcgttggaattctagagttcttcgataatgcaaaagaagagttaagaaacggatactctgttttgatcgaagctgccaagggagcttaccagtgcattaaaacgggagaggagttggagtcatgaccaatttagctacgtatgttatacgccacaaaaagaccaaagagctttggaccactcctaaaggaaagcggcaatggaccacgaaaggaggggcagcccgagcttggagaaacgcatatgagagtactacactaggagcgtactatgctaaaagagatatggaacggtggcctgacctgaacattcctttgatagtaggggccgctcccgcacgtctggccggctgggaagcagcatcttttaaaaaccaatcagctttcgagattgttgatattgctgaatccctgaagcacgaaagccagttggtgctcgatctactgaaagatgttattgggttcgaagtgccagaccacatcggagacggatatgtccgactcaccattaaaacgtccacatacgacgatatcatcaaactactgaaggaggcaaaatgagcatgactgacccccgagcgtatttcatcaaacaggagctggaggaagcaacgaagcttctagaaagagccctcaaccttctagataacgtccattgctacgatacagatgtatacgaggacattgcagcattcctctacggtcaagagtgcgaggaggaataaggtgcagcgcgatattagtaaaactatagcagaacttcgggacttgatcgaagctgtctctatgctcgacgaggccttggttatgatgcagaaaaacggactatatgatacggacttgtacaaacgtattgatgcgtttttgtattatcaaccgggcgagggcgagtgggaggaagtagaatgagcagcaagaaacactttgtaatctctgatacacaatgcaagccgggtatcagtctggactacatggaagctatcggtaagtatatcgtagccaaacgtccagatgttgtgattcacatcggggatcactttgacctcgccagcttgtcgtcttatgataagggtaaacgctcctctgagggccggagatacgccgaagacgttcaagtcggacgtgagggtctggacaggctgttcaagcctctgtgggagctacaggagcgtcaacgggctaatcggaaaaaggtgtaccaacctcggttgattttcacactgggtaaccacgaagagcgagcagaccgagcggccaacgacaaccccgaattgtacggcacggtcggaagtgaggaactgggtattcaggattatggttttgaggttgttccgttcctgaagcctatcgaggtggatggcatctattacgtccactacctacaaaaccacttcactgggaagcctctgggtggcacagcgaacaacatgcttaaggctgccggtcattcgtttgtcatgggccaccgtcagcttctggactgggcgatccatcctacaattgacggaaaacaaaggctaggcattgtgactggagcgtgctatcctcacgacgaggcttacaaaggctatcagggtaacaatcacttccggggttgtgttatgattcacgaagtgaaggatggttttggtctgccaatgccggtaagcctagacttcatgatggagaaaggaggtttcaaatgacggtttataagttctggtgtgaatgggatatcggtatcaatgagtgcctgtggcgagactactaccagatggaagaagatgtagctaaagccttgtcagattgcgggattgatgatactattgaggaactggaggacgcaggcctgctcggcttcgactctgttaaagttatcggctaattaggtaataggagggcatatggctgagtttttccttggggcggcccttgcaggcttgttctttatgtttagtatcactgcgagctttaccgccgaagatattgagaaagtgacttcaacatgcgagaataacgaaggcgtcaagtatttcggagttgacttcttcggagacggtgctgtacactgcaacagcggcgctattttcaaaatcgaccgcaaatctaaataatcgaaaaggagatataaaatgactgatttcaacatcacccctgagcaaatggaagaagcaatggcaggtatgaaccctgagcagcgggctctggtagagaaagccttgaccgaccgtaaatctctggaagattccatcgtgaccgaggacggtgaactggactatggcatgcttgcacgacacatccgcaccagcttgggtgatctgcctctggtaatgggtggccctgacttcctgaagctgatgatcttggttgctgcgatgccggagaccaaagacgatctcctgactctgcacatgaacctgtccttcattctggactgcattcgtgaatcgattagcgacgaggagtaacaagtggccgaagagattgtaaaagaagacctatctgtcgacgatctcatggttgactcagcagggctagatgccctgctggccttcctagagagtcagtttaaaggtccgaagggtgtactgaagggatatgtcactatgagagtgatgtgcgctaagatcgagagtcttgacgggtttcaagagttgaaagatatggaggtgaactttgagtaacgatatcatcaacgttcatgctgggcaaccgatttctctggtgcaacggtcaaagaatcctatcaatattcaatattgggacgccgataccatcccttacggaacagtcttggttgttaccgagaaaaggggtgatatacgaaagggagaattggtcgtaaggctggctagtagtgcagatgatgagcactctgttaaggtatgtagattctctgatttcttcctcctaatggagaggggttatgacgcagccagtctcggcgacgttaaacaagcgtatgatgttctgttcgaagatcacccagtgactacctttgttaactgggatcgggctcagcctttgacaaacagtgagcgctactacggagactttctgattggcggcgaccctaaagggatgccactattcaacatggctgttcttaaaaatgttctgtcgccttacactgccgacgatgaggaactttcagctatgtctgggaatcccgagacagtagagcacaaagaagttgacgaactaagtgagagggacgaggctttagccgaggtcgacagactcaatgaagagcttgttgcactgggtaagaaggttgtgttcgccaacctagaagattacctaggcaaagaaaactatgccacattggaagctatggctaaccacaaggaggctgtaggtagcggaggctcctctagttactacactgtcaaggtgaacaaccccactacgaaggctaacatgccgtattttgcagagtgcaacgatatcatcgaagcgctggatatgcgattcggtcaaggcaacatgttcaaagcgttgtggcgggctgcggcagcacagaacctaggcaagctgaaggccggtaacgatgttatccgggactacgagaaagtcatcttcttcgctcagttggagatcgataagattctcagagaaaggggttgacattctccccgaggcttgcgataataggctccaagttgaaacgaaggaggtgtgtagatatgatccagaaactaaaacagaagctcatgatggtgcatcctatcctcgctagcgagatcgtctggtgcctcaccttcgcaatgcttcagtaaaacaagggagcttcggctccctttattgtatcaaagatttaataaggagagtttatgcaaatttctgcaaaagtgattcaacacagttcccggatcggcctaggtacgaagaatcacagattcatcactacattcgaactggagtatcctcggtttattcacagtgaacttatgactcaccgactttttagtcgaaatgctgcaagtagtcgtgccattcccgttgcccatatgatccgacaggtggaagagaatcctgcgatgcctgttcactggggaatgaatcaaccgggtatgcaagctgagttcgaactgagtgagtgtttgcaacgtagctctcagtacctgtggaagaaggctgcaaagagtgcggctcggatcgctagcgcactaaataaaatgggactccacaagcaggtggttaaccgtctccttgagccgttccagatgatgaagaccgttgttacagccacggaactagataacttcttctacctgcgttgccataaagacgcacaaccggagatcaaggttctcgctgagaaaatgtatgaggctcttattaaagcgggcccggcagaggctctatatgacggagagtggcatgttccttatgtgactcggttccgcataggggatggtaagctgcgttacgcagattgtaacgggcaagaactgagcgtagaggatgctattaaggtatctgctagctgctgtgctcaggttagctataggaagaacgacgagactctggagaaagctcttgtaatctacaaccgattggtagatactaagcccgttcacgctagcccgttcgaacaccaagcaacaccgatgctccgcatctcggacaatcaaactggatgggaggacggtgtgacgcacttggaccaatatggtgacctctggtctggtaacttccgaggtttcatccaacatcgtcaactaattaaagggcacgtatgtaatgagtactacggccaagaagaggaaggagtttaaaaatggcagaatataacctgagtctggaagacctcatgctggtcgatggcttcaaagaggcgttccagagtaacaatgagaaggtagtaagggagcatctgtggactaacggcatggatgttaaaaactactcgtatgaaatggttttctgtcagcatcgcaccctgattggccgagtcgtagagggtctacgattctctggctttgagcgtacagacaaggagtggctgagcctcggttgcgcctctctggaagctcatattgcagcgtgtgatgatagtaatctacggttcactcttcgtaagatgcgaccagagggatcgacagaggcaacgttccacaattaatgcagtaggagtagatatggaagttacaaaggctctcgtagatgaggccgatattttcaataagatcacacaaatcaggactccaacggagtcctatgcccggaaatatccggtcattgtcgaactagcaaaccagcaactagaagagaagttgtggttctctagcgaaatgaaggtagagctggataagttgaacctgaagtttaagttggaacctcatcagcttcacgctgtaaagactgtccttcaactgttcctcaaatacgaactgatcgtaggcgaggagttttggatgggtaaagtagtccgaacgttccctcgcccagaggttaaactagcggcttcgatcctgtgcatgatggaattggcagtccacgctgaattctacaaccagatcaacgtagtgctggggatggatacagatgccgactacgtggcgtacaaggatgacccggagcttatgggacgtatggagtggcttgagtctgtgctaggcgacgaagacgatgttctttcggtaattatcttcagcctaacagagaccgcccttctgttcagttccttcgctatcttgaagagtttccagtgcaacgggtacaacgatatccctgtgatcgcacgcggggctaaccagagtgctgtggatgaagacttgcacggtgtagtttcggctgagatcatcaaccaatactacgcagagattggtcgaccattgtctgaagatactcggcgtgtcgagaagattcgacaagctatcgaccatgtatatgctcatgaatgtcgtattgtcgatatggcgatcccgggcggagaacttaacggcgagtcggctgaaaactataaagcgtttgttcgttatcgtttgaacgtatggtgccgtcgtctgggtctggaagatcatttcgagaacgatgacactccgatcaaagattggttcgaaatgaacacgtacgcttacaaaatgattgacttctttactccgggaatgggcatggagtacgaactggggtgggatgaagaggaactagcaaaggcttgggaagaggagctgaaatatgagtaagagagacacattcaactattccgaagctaggaaaaacagtcaagcagcaggagagactcctctgtggtatacgacggctggctaccagttgttcatgaagaaatattcaaatgagggagagtctgttcgctctcgttttgagactgtagccagagctatggctcagcacgcccctacggtgtatcctgagtggtgggaggaggacgaatacactagaggcaaggactgggaacaggtattcttcgacgttatgtgggacggttttgtaagcccatccactccgcttctgtcgaacggtgggctccgcaagaagggcactacggtatcctgtgcaggcgggttgatggacaacaacctctatgaccgttacaatgtaatgacggagattgcagtgctaacgaagcatagtcacggcacaagcttcagcctgaccaactggccatccgaaggcgatgccattcgtggcggagagtcacagggtgttatgcctgtcattcgtgacgttatcaacgtcatggaagaggtcgcacagggttctcgtcgtggtagctgtgcctacagcattaacccccgccacggggacttctggaacgttatcgatcacctgtacaagcgtacagaatcgaacaacgtcggatggttgctggacgacaattggtgcaaggctatggccgagaaagaccctgaaacgctgaaacgatggaagcggatgatgttcgttaagctggcaagaggcaagggctacttcacgttcattgacaagatgaaccggcacctcgcagagccgttcaagcgagcaggtctgaaggtagaggcatctaatctttgccaagaaactgtgcttccagctaatgacttctacacattcagttgcgtgatcctaaactataacctcgaactctaccgttcttggcctgagcatctagtgttcatcgggcaggttatgtcggattgcaacatcagcgagtacctcgcaaccatggacgaagttagcattcaggaccgaagggctctggagaagatttaccggttcaccaaggacttccgagcacttggtagtggggttctaggattccatactctgctccagcgggaacgattcccggtcggcagtatggacgctatgttcctgaacaacgccatcttcaaagggatgaaggagcaagcggaagcttgtaacagttggctagctgaggttctaggggagccagagggctgccgtggactagggaagcgtaatgccactacaatgatgatgccgccaactaaatcgacggcagaactcatggctggggcttctgagggcatcggactggacgttgctatgtgcttcaccaagcagagcgctggaggtgaattcttccgtgtcaacaaggtgttgctggagattatccaagagcgaggccttgattgggaagagtgtgcaaggcagatcaacgaacgcaagggaagtgttcagcacgtagactggctaaccgatcatgaaaaggctgtattccgtactgcctttgaggtgagaatggaagactacctacgactgtgttcccagcggcagaagtacatcgaccaagggcagagcatcaacctttatttcacgtcgaatgactcgccggcttacatttcgtacatccatcgtctcgccatggaagacccgaacatcctatctctgtactacatctacagtatgagaggagcgggagatatctccagaacagaagaatgtgaaatgtgcatgtaaaatcattggcccggggcttgacagcttccgggcctttgtgtattctgagcacatcaaaacaaggagggactaaaatgaacaaattctctgaagtgtactacacttggagcgcagcgtgctctcgtacaaatatcttgatagatatgggatggactgctacaatccgtcgagacttcactggcgggatcaaccctgtatgggttgtggagttcacgcgatgaacagcaaactccgcaaagagttcgataaatggtggggacaggacgagcaagaagaacttcgtaaatcctgtgccaaaggatgggcggaatatatctggatggctagtcgaagaaaagtgagtgttgagcttcccgcgccagaaggcggatttatcgacatccaaaagtacacaatcaatcgctgcaaagaagctatccgcgaaacaggactggaggtgttttaatgaaagaatattttaaaaagcgactaatgcagaccagtgaaccgttcgattcagcgacgcaagctatggacgtagcgattgcgtggggaggggctaagtactgcgaattcacttgcgtaactgcggataatcgcgtcatcagcatctgggagtacaatgacgtagagcctgataaaccggtattcaatggacagcaacgaatcttagttccaacttttgaggaggtagtataatggaacaaactattgataaatctcggtatattgtgcttgataacgaaggtcggcacgttctgaccttgtgcgagaaggccgcctataacctgcttaaaggcgttcagtggacaaaggacaagcatggtcaaatccatgtaaatggtgtcacaggcgttgaactcggagttcgtcaagggattatcgctgaagtattcctgtatccgggctacatcatcctagaagaggtagactaatggatatgttcgataaatacatgcaagttatgtatgaccgggacgctttctcaaggcgagtcggtgagttagaaaaagaggtagccgaactcaaggctaaggtggctatcgctaagtgtgatatgcgtgtcgtgaaaaccctactggaagatatccaatgggtgtatcaagacgaagctatctatactctaccgggctacgtttgcccttgttgcggggaatctgcaaactatgggcatttccaaggcagcttcgataagagcccctgcctactagcttgtgtactgagccggagtgaagcatatgaagcctaatgttgtagactcgctaggcattaacatgtgctacgcctgcggaggtaaactgtacgtccgaggagtatgcactatctactgccctgactgcgagaaggcagagaaagataaaccgttcgtcaggatgcagcttctacaggatatcgcagacagtaagaggcttgacacagaataatattctttgtaagataagcccatcacagacaaggaggagccgagaatggccactacagagaaaattattgagtacgtcgaggtgtgcatatatcgcttgcaggaggacgtgatggcctattctaagggcttcagggacagagccttgtctaatcggacaggctacattcacggcctgattaccatggctgaaatgaatgagcaagtgagtatcgaagactgcgacaagctccgagctaatctgcgggacgcttctgaagcagtgatgaacacattggacttttaaagtcaactaggaggaagttatgataaaagattttgtaaaactcgttggcttgtctgccgtagcctgccttctgcttgtatgtattataggcatgtttgttacagttctgcacagtggggcagagattgttcaatctcagatggaacagaaagacattatcgtgtctaccgatgacggcaccatcaatctcggtcgctccgtgaagagcgagaagctgctgtacagcatgtgcatcaaggtggaagaccgtaagccagcttgcgaattcaccaccaaggataaggtagtacatgaagtgcggcaggtgatgcgcccgggcgaggctactgcacgtgacattaagattgcagttaacgcagcagtgacgtatactggagagaatggtcagaaggctacctccctgatccctccgaaaggtgaattcctgccggcaggtactccgtcagaggtgcatatcgaaacgattgaccgcttgttcgacagcgtgtataatgactacaagcaaaacttcagcaagatgtgaggaggactcatgaaagcacagcctaaagaagtagagaccctatctttcgacaagcgacccaaggccggggatatcgttcgactgcggtccgatggcaaggcttacgaagtgtgtgctgtgtatccgacagcggtaggctgggaggcggcgcttcgaagcgtgtacgacaaaaccaagactgtcactgtcggcatggagtggtgaaatgtccgcgactaacaagtgcgtcaacttcctccctgtcactccggacgggcgagtgatcgtccggttcggtaaaaagaggttaggatggctcggtaaagagggtaaaaagtggtattattacccttatggatgcgaaggcaggatcaaatccgaaggcttcaaaactctgatcgatattaaggcgtggattaaaaaccccgactcggtttggcccgggcccctagcttgagattgactaataagccgacgaatggtacaatgggatgtaggaaattccctactcagtataaggaaactagcaatgactagccgctggaaagaggccgtgtatcgcaagtactcggtacgtcgtctgcggcaggaactcgaagagttcaaagaagctagacgctttgcaccaaatcaacgcatccgtgcatggtttgatgctcatatcgaatttctagaacgccacttggctattcgagagtccggccaagcctacccagacgaccttctgtaattaagtgttgtaggtagagattcaaatcatggttagtggcaaggacgccacactttcagcccgcccacaaggcgggcttctttttgcctgcaattcagggttgacttggagtaccagagcatgtagacttaccccgtccaacacaaggaggaataaatatgaaattcaatatctcaagacagttatgggtggctaaaagccaacggaagggcgattacaagggaacgcccttggcgtacatggctcaagtagacttcaacaaggacggaagcttggcttctagcttcaagaagaagcagcagacaggtgagggctgggcaggaaagagcgctgagacgtgcttcgtagataatgtcccggtaacggggcacttcatcggcgacagcgtggagcgctgggtgaccgagaacaagtacttccgtgtaacggacccgcgaggtttcgttctggaagtcccgaccgggaacatctctaccctgctattcaactgcactgtagtcaagggagtcattcaagagccttgtgtgtgggttcggatgggttctcagcacgttctactgccggaaggttcctctctctacaaagaggctgtaagcttcgtggagcggaaagagtcagccaagaccgttaaagatatggttgcaggggatcgatgcaccctccttagtaacggtacagaggcgaaggcggaggccatctacctcggacgggtgaaactcacttggcaccttctggctcaaaagggccggtactctaaccgtggacgtggcgggtgggcttatcgctggggttaccaccatctggagcgggagttagatagaaaagaattcaccgagaaagattccaagtgggttagtgtgtttgctaagaaactgagtctcggtggacgatggaccctcgacttcgttctatcgccgaaggccactgatattcagtctgggacagttccagaggaacttgagaatctggacttggtagatggtgtaatgtgggagtatgacggagaggatacccgcccaatggcctactactattctgtacctgatagggtagtcaagtgtatcaacgtagacgaccccgcatgggacgctcgatcctacgatgaggtaaggtggactaaagagtggactgtagtgggtgccgagtggcgaaaataagccaccattattttagaattgcccggcgagagccgggctttttcatggcaggggttattttcaaattatttttagatttctgggagtttcggccaatatgggcaatatgaaatttctcaggaaaaggctcagaatgctcgtataagagccgttcgagtgtaggtatggtgagctactacttagccgtagaaggacagtgtaacgcttaataggagggttagaatgaagattgacaacggtggcgaatatgcgtattggctggcggatatcaaagagtttgtttctcagatggatgccacagagatcgagaagagggcttgtatagcatacttaattagctggtatcagcgaagagtactgcacagaattaaacgggaggaatacgaggagatctaagctagggaccggatggatttttagggactggatagattttcacagactgcaaaattgagaactgggcagatttttaggaactggacagtttttcacagaaggggatttttctacagaggaatttcccctgaaatttagccggatttctcagaagggcggatcgttagcaggctatctaattggttagcaagctacctttaatcgttagcacactaactaaaaattcctaggacggacctcagttggcacgaacgttgcaagcccgcaccagtttcccgggcaggcgtaggcctcgactatccgtcgtgaaggcgatatgtagttggggactcgcaccccgcgtttaagatgtgcccattctactatgacagacagctttgtcaacattctttttatggcataggctttgcaattgcaattaacatgccaacacaaatatcaggctcctccggtgtttatctccggtgctcggcttccagcctgcgttgcccgcatgcctactattatacacaagctatcaagagaagcaagaaaaattatagagaaaaatctacacaaaggaggttgacaggcctcctttatatatgcacaatgatctcacattcaacggaacgtcaggtaagcatcatgctacatagtgaagcccgggagatggccctacaagagatgggcaagtggagtctcctcgaacaaggttggaaattcagtttcaatctcaggatgaaacggacgctgggacgctgtaatcatactaagaagctcatagaacttagctacgggtatgtagctgctaatgggctcccggcaatattggatactatccggcatgaaatagcccacgctaaggcgggaccggatcagggccacggatttgtatggaaagagtggtgcggcttgattggcgctaaacctcagcagtacgccagcacaaaagaaaaagtagtcaatttcccgtggcaactggcgattcagcacgactccgggcacttagagcggctcaatcactacggtttcagacggaccaacatggcgaaaaagcaggtacgcgggcgtcctgagacaaagggcagactagtttgggtgaagagtgaaaataagggttgacagcttaggccattcgcgtagaatggccctcaagcaaagggaaacaccctgagcaatcacgaaggataagtagatatgaaagcgctttgtaatcatcgggcactctacgcagcttacagccgtagcgagattgatcgcgttgcggtagacctgaaccgttactttcctatcgagaaagatgatgaatgggaagatggaccgtacatgtaccgccgccggacctatctggtgaagcattcgaagggcatagcaaggtggcacagtctctattgcaatgggaccgtccaaggcgttggcgtaatcttcgacgtaaagtcgggcgaacctttccgcacagcataaggagattcagaaaatgcaagcttgggatgtgtatcagaacggccaattgatcgatactgttttcttcgatatcatgtgtgatgccgaagaggtgcggaaatcgctggtcaatcacgacggatactcgtctgatactactgtagaggaggttgagtaatggatagtctatctgttaaaatcgttctgtcggaactgagctacaaggctctgattcaagccttcgccttgcttggccgaacgctcgacctagacgaggggttggacgatatacttaatcttattgcggatgagatcgctttccgcgacggcctgccgcctttcgcagacgactgcgataaaacagaatggatgctccgtcgatgggaatcgctcccggtggtatcgtacaatatcgggcaggacggaccgattgtcgctcggtctatcgaagtaaaaacggcatgaggggagaactgatgaccgtcagagtaggagatatcgtggctatccggggcgacattcggaaaaagctcgacggaacatgccaatacacgcccgaacaattggtaggtggtaaattcctcaagcatgccggcacgggagaaatatggactggccgagtgagtaagatacaaggtgatatggccaaggtgggaggggcttggcgcgggatcgaattctatgtgctcattagtgaaataaacgcttgacaacctgacccactagctgcaaaatagcactcacagacaacgaagacgccgataggcgaggagaaagcagatgcaaatgtttttcaaaacccgcacccaagcccgtgcaatggccaccaacggtcgcaaagtggtagacaacggggctcaagctgaaaagcgctgggctgtcaagctgaacaaaaaggaggcgaaataatggctaagtctgtcagtgtagatcgcaagcgttccatcctcgacgaggcgaaagacggtagctttttcagtgtggaattcgtcaaggcagacggcaccgttcgaaagatgacgtgcaagcgccagattaaatcggcgtatgctaacggacagtatgccactcgcaaaccgaccagcgctggcaagccgcacctgtataccgctgctgaggtgctgaacatggaagagggtaaatccgctttccgtacgatcaatctcgaaacccttatccgtgcgaaggtgaacggaatcgagtataaattcgattaaaagcttgacagcctaggccattcctgtagaatggccctcaagcaagacaaacttaaacagaaaggagattaaaatggcacgttctatcaaggcttccgacttcgattccgcttaccagttcgaggccgccaaacgttccgaacgtaaagagtcccgcaaatcgcgtgacaatcgcaaagctagccgaggccgagctttcgacttcagtagcgatatgtaaggtttgtgccctgccggcaggcttaaatgccggcaatcctaagcccattcgtcgagtggttttaggattctcaaccccagcggagataccaaaaatggttcgtcaatgcgtaccctgtcccgatgctcgccatgctttttgccttgcatggttgttcgccatgccggagttcgccggtctgcccgctcaaaaggacataaaactctttaagacttcgggacaatgggcggtatgttatggctagacgacagcggctcccgtcgtgggttcaagaccagaccgaggatgaaacgccgctgagggacaggatagacccctaccttagcaagcttggcgaagtcgataagctagagggacaattgcgacgggtcagggatgcaacggacccggacgaatacaacgaaatggctaaggtactaaaagcccgacgccggaagataatgaagcaacgtgcccgggcctacggtctgccagaggatgagcctaccaatgtccaagggtacagcgtaccggaagaggttcaccgtagagccatcctgttaagcagtgtaaaaccttggatgttctggaccatcctgtctttctcgatttttgtgtggtttgttttgaaaaacagttgacaaggttcccgcctcctgtagaatggtcagcaagaaaggcggacaggccgcctagctagataaaggataaccgtcatgcacttcgttcttaacctcgtttccaaaaacagcaaaaccggtcccatgcctgttagcacgtctcataacggcacctgcccggatgcctgccctctcaaggctaaaggctgctatgccgcttatgggcctactgctattcactggaaaaagctaagcaagggtgaacgtggcgtagagtggaaagagttccttaagcaagtgcggtctatctcccgtggggatttgtggcgtcataatcaagctggcgatctcgtgggtcaggatgacgttatcgatgggatcgccctgatggaactggtgaaggctaacaaaggtcgtcgcggcttcacctacacacattacccgatgaacaatttcatgaaccgccagcacgtattgtcggccaatcgtagcgggtttactatcaacctgtcgggcaacaatgtagcgcacgccgatgaactggccgacctgaacatcgcccctgtagtgactattctcccgatggacgcggagaatgtaagctttacgccgaaaggacgtaaagtggtagcttgtccggctgagaaaagcgacaaggtgaattgtaagtcgtgcggcttgtgccaagtggccgaccgggagtatattatcggcttccgtgcccacggcacagcaaagaaaactgtcgatctcattgctaagggttaacacaatggacgaatctgtttacgcaccattcaatcagtgtaagatgatgggcctagaacgaaccgtgcggagcctagcggctcctaacgggtgcaaggtagtcttgtatcaggaccataagaacaagcatagaatcgtcatatacgatgccttagggcatggaatgtctggggtcatggtgcaagcggatggggaaattcactacaaggaaactcgcaaggctagccaagggcagaatctgacaaggcagctacaagctcagctaaccgcatggggagtgaagtggttcccctctcagtatcagacagcggcgggcgcggcctgctacaaaggaggcgagtgatgcggcagcttaacaaatcccagcttaaggccttggggcctaagatcgacctagccttagagctagcttctactggccgtggtggtctaatgaatggccacggctctacctgctacattgcaaacaaagccgggcataacattctgcgggttagctaccataactcccgattcgttgcatatggtgctgagagtgtccgggtgactgggaatgtcattgcagcatgggtggaatggaagggcattaaccgggctgcaatcaacgctctgagtgagtacgggtatcatcctaacctgagcatagggcacaacgatgctcttaagactctgcgtgatatcgagcgttaccagtgacggcctcttactcgacagagaaacggggccagaggtgggccatcatccgtactgagcccggttacagaggtgaccgggtgaccgtgctaggattctgtatcaatcaaacgcacgctcttaaaacggtagccaaattccgggcttggcaagcgctaggctggccctacacactgaaagatgacagaaaataaatgcttgacagcctaggccattccagtagaatggccctcaagcaaagggaatcaccctaagcaatcactaaaggcaggaacaatgaaaaccacagagcaacggcaagcaatactccccggggccgccggcagtcaagcgacgggcgcctactacccgatttactgggatgaccggggctacttcataggcccgatgcgtcactggaaaatttacaatcgctgcgtctgaagcatcaagccatgcttctaataaccaaccatctggagactcaaaatgaaagctgtagcccagttcaaaagtgaagactacgaaagcggtgatagccgtactgctaccgtctatgaggatgtttatggatgctacgtcgtgagcgttttcggaactagcttgagcgaacctgtcagctaccattggggtccgttcgagtataaagaatctgcaatcgatgccgctaagtctgctatctaactgaaaaggggccacagaatgaaaatctccgctattctgaaaaataacctgaagttttacaagaataattcgttcatgtgcgctctggcgttcgataatgtgtccagaaataaagctaccgaggtgcaagaatttatccatcagctactagggcccttcgttaccttgcacgctaagctcaagaaagagataccgggttacgaaagagccgtatatgatgatgagccagaggatgaaatgactttctttgtatcggatagggcctatcaaatgcgttgcttgtggtgggaaactgtaatcgaacaactagaggaacaagggcaatgactcaagctaactggagcaaaggcgtccgggttgtcggcggaaagcgggatggtgagattaccctgttcacaagcgcacacttcagtgaatcgctaggcttatgcgagggtgatccttatctggtagaggctttgccgatgcccgccgcgctccggctgctagtcaaatggaacaagctgtgcagccgaatgaagcttgactatcggtatgaactgctgtagtctgcaatctcaatcaaaacaggaatgctccaatgtcgattctagccttaaccctgaccctttgctctgccgttcaatgtgatgattacattatcgatcactcactcccgggacaagccgcagagtgtaatgctcggctggtggaggaggccgaggagtggggcgatgcttgggtatcaactaacgctgatgcccgactgacccgctaccttagccggttcaatattcaagttgaccctcgctttgttttcgactacgattttacctgccaactcatcgcagaggatgaactaccatgaacgcgccccatctttccctcaagcagtaccgtcaacgtgccgctgtcatcgtccgccgagtgaaatactatgaaaggcgctggctccggaccgtagagtttttctcaggtgctgccgctcagaacatcgcagaacgctttgcctacgctgggcatgctgaagagcaaatgaccaagctcaaggctgagtttgcagccttcccggtggaggtgaggctagatgctctaggttggatcaattggaatactcacaatgacggcctgctagaggagtggattcatcaggaaaccgaccgagccatcatgctcgaatatgacgaaaccacgtggcgtcctgtagcttgctgggaaaccactgtcgatgctcttcccaagctggcaatgctgtaaaatatcgcccgttaggctgaaataatgcttgacgggcgtttttgtacctgtagaataggcctcaagaaaggaaaacagccgaaaggctcaatctgaaacccggagatcgataaaatgctgctagttcatggaaccactgcaaaaggcctgaaagctatcatgaaccgtcgaggcaaggagggattggccgcaccttgggacgtttcggaccatgacggaatgtcctacttttacaacgtaggcaagatggagtggcacgacgaagaggagtatgctaaggcagaatgcatcgttcgttgcctagaacaggcccaattgcagcaggctatgatggccgaaggaggtaaaatctatgctctggtggttgacattcccgaagagtttcaggattgcgtagaggatgattattcgtgccctaacgctagccaccaagctagctgttttccagaggataattttgatccggcatggattgtagaagtgtatgaggcagatgtgagtgtatgggccatccctttcatcgtagccggagtctcaggtaattctatgttccaatcccaccaactacctgacaaactggtggcgatagcggagtcggtggcgcggtccagtgacatagacacatacgaagctttcgagatcgaccattcacaggtggagctatctattctcgaaaatttcaaagataacgcttgacagtctagccaactagcgtagaatgcctagccaaggggtgcataagcgccccacctcgaaaggatacagaaaatggccatcgttgatcgaaccgcaggtaatgaaagcccgaatcactgctacatcgttactggcagcattggaccagagtttgagccgaccctgttcactacccatgcgctggcaaagaagtatgcccagcagatagtgaaatacggtaaagcaaacgacgttttcccgccttttacgcctgttatcgagacccggcacaaggcagatatgaatcggttcactgttcacaacaaaatccccgaataggagacgtatctatgaaactttctgaaattttccaaaaaggcctgaactatgcaattgagtacggaatgccgtggtatatgtgcatccgtctccgggagattcatttgttcccctcgcccgttgaaatggcagttaactcggtcatgatgtctgccggtatctcatcaaccccagagggatgcgaattcgccggcgttgatgactatttcgaggaaagcggcctagcagccgcatacaaaatgaacaatcaggaaatgtccgaatacgggcgctcatcctacgcaatgtgggtgcaattttggttcttcgtaatctttgacttagcccgaaaagggcagtagaatgcattacaagcgtagaacagccagcaaataatgtgatctagagggacggtcatgggtgacaaaactgtagtttatcgggtggagtgcaggaacggcgagggaccgtatgttaactatggtatggagattgatacgtcctccactcccgagcggcccgtaccggagcatgacgggatacctgatgttcgccattttgagtatttcgccttcacgtctcctaaacaactagatgactggttcggggactactacagcaatctgaccgagcactccagcgcctcaatcaaaatgtatgaggtggacaggcagcatgtaaggactggtctccggcagtgtgtattccgcagagatgcggcggtttgcgtcaaggaaatgactattgaccaatgggtaggcctgcttaaggctggcatgatctctgcggtagtcgtacaagctctggccccgatcccagccgaacaactatccctagacctaggggacgatccggcctgtgaggctcagaaagaaattttgaaaatgttcagtttatagggttgacagcttgggccattcgcgtagaatggccctcaagcaagacaaaccacaaacccggagactcaccatgaacaagccaatgaatactttcgcatacgcccactacgtcgcccgcatggacaaggcctctggcactagcctgccctacgccaccctgttccgcatcgccctgcgtaacgcctaccgcaagccgggtgtccgccagtacgattgtgcagcactcgtcgaggatatcaaagcgcgtgaactggtccaaaagcgcattcgggctgaaaaagcagtagtgatggcggcagtaatgcgtgcaattcgtaccggcttcaccgttagcgtgaaagatggcagcgatggcgagtgggtagtgaaaaagtctaccgatatcaaggaaatctctgatagcctgcaatctaccgacgaggatatcatccgcttccgcaagggcgacggcccggacaacatcgtcggctctatgtgggcaatctacggtaacagcgccggcgaagtgatcgccgactggactgataatgccaccatggccatgattatggctccggctgagcggaagatggaaaaatacgctgaattaggtatctaatgcttgacggggcccgaaaagggccccataatgcacccataccagcaaacaacatcaggaccgccccgatgagccagatcaaaatccaatagtatatcgtagccgagatcaaggttaaccattgcgctcacctgcgcaagggccagaccatccaagcccgcgatgctcgtagcagtgaaaagtggattgcattcatggtggaacgcgggtatagtgcctctgaagccgctatcctgttcaaagatgcacatgatgtggcaatgctcgaactggcagcctgaaaaaatcctactaggagtactgacaaatgaaacgccaatatactgattcctaccagtgcaaagcaatcgacggcctgatgtctatctgcggtggtaagaaagctatcgtacaagtgtggccgtccttgaaagcctctcgaaaccgccggctgaaaaagatggtaaaatacattgcccggtcaggatggaaaccgtaaccaactgattatcacagccccggcttgccggggctcacaataggagataaaagcatgaataccctgattatccgtttggattccgcctacagcgttcaaactgtccgtagtttccttatggaagctgtagagagtattcgaaagcatatccgggactacgcggttcatgacgaatacgattcgggattgagcccggtagcacccaatcatcgacttgcaatcgtcaccttagacgaagattgccgagtgtttcacattcaatgcgagtcacctgatctttatctggcgaaccctcggatcgtgtttactgatgttgaaagcccggcatataccactcccgtgaacgagatcgaagagtatagttacatgaccgcatggcagcatatacgtcaaaaagatatgacagcaaaagactacctgtcggattggtctatccttttcgcctcaaaggagaatgccattgatatcgacctgcgccccaatctgaaaacgcaaatcttgcattaactgagggagctaggatgaagcttcgaaccatattcgaaacctacgattgccgagttaggtttgtcaccataaccggcgtgtttgtggaatctcaaattgtgcggagtttcggtcaagctcaggagattgtatcactcctctgcaatcccgcagatactggtatccgtctatccttcttcgacgaagaggagggctgcgagtcgatcctctgccgattcaactacaaaggagaaatcatcaaatgaataacaagtataaggataacatcattgcggaatactgccatttcgacggcagacggccagtcctttccttggcggcacgatgggtccaccacgacagtcgagttgtgaagctggcagcgctctttgcctgtgctggctatggccgtccttacaaagattgtattaaggcctacaaggacgccaagcagcgggaaaaggatatgcgaaaccctgccaaatggaagctgagccgagcgactaagcgggctctacgggctcgactagtggctatagaaaaactagaataatccggaaaatacctgttgacgtgaggctagagggttccctatactgtgcctatcgagacgcacaaggcgtctcctaagctagaaggactagcaaaatggcaaaggcaaatctgaagttctcccgcattggcaatgacggctacgactacgcccgcagggaagacggggtttggtttgtcagagaagggtactacgggcggtacggctgggctaaaaccaaatggactcaagttcaacccggggatggcatgactatagtcgatgcctgcctgaaggctcacgaagctggaagctccagcacatacatcggattcgggaatctggtggtattttccgacgggaaggggctccgtttaccctgaacaggaactcaaataaagttgttgacagcttaggccattcctgtagaatggccctcaagcaaagggaatcaccctgagcacctgaataggtaaaagacgatgcaagcaacctaccaagccctgaaaactctgcgcgatgcttgtgaagctgtcaaggatgaaaaaggcaccatcaacggaaacaaattgaatgcactgcgtaacaaggctgtcaaggaaatgcaagctggtggtgaaacctactctgacgccattagcatggctcacgacttgattaagaagtatcgcaagtaatcaatccgtaacaagccccgggtgaccggggcctctcataggagagaccatgaaaaacgttcaaatctgttgttcgaagtgtggagccatcaacggcggtaacagcaaacacaattgggttatcgcattaggcaagaagtggtgcggtcattgtgggtccaatctcacaacccttcgtcgctaaccattcactgagacctaatcgaggagagatcatgaacgccactctggcacgcctacagaacgaacgctgtgcaaccctccgcctgatgctgctgccggaacatcgtgggtatcagttctctggccatccttgggccgagcgcatccgcaatctccacgatgaagccaagtgcatccgcagccatcactaaaccgcactaatccattaaaactctaacagcccgccttgtgcgggctttgttctatctgcgaaagcgacagctttcaagtgtaattaacatgtaatgttgtaacactctgtagaggtaacaccagcatgacaagatagaccacttgtaacgttgacgttacatgtataacagcatgacagcgaaagctgtacagatagcattctgtccagttcacccctatcaaataaccccacaataacccacctaaaacctatcggttttaagcggcctgtaaggccgtatatgaagcgatagcttcgctatgttagtctgcaccatcaaggcgagagccttacagcatgaggcttgtaggaggttttaaggccatatgcgattagcataggatgttggttgttttaggtagatttttggtataacccctttcagcgctaccattgtcccggtgatgttaagcgacagcttacatccgctcccattttgcaatggaaattgcatacagttcatcatgcgcttcaaaagtgacttcactttgcatgcggatgcatgctatagtataccctgtgatagctccgctatcccgttttgcatggcacacgaattgcataagcatgacaagggtaaccctcgaaagcggagctttcaaagtgtaggctgagtgtgggctctacctctattatatttgcgaccggaagtagtgacactgaaaacgttgactctagcccagtaaatacgttaaactaaaaggttgatagctgccgctatcgagtaaccaacattcacacaaggaggcacaatgacaagcaacaatcatgccaagattcacatccattacgctaagcaaatctactacgccatgcgtaaacgtgccatcgcaagcgatgagatatgcaaggaatgggccaagcccaagacaggctttgaagcgttctatgattgggtggtgaatgtgtcagggtacgccgtaggctaccgcctagacaggaatatcctcttcccgggaaacaagctctatgctccgcatacatgtgagttcacacctacatacatgcatactctattcaccaactgcgacaagacaagcaataaccgtgccaacaatgatctacctctaggcgtccgcctagcccgtcatgacaagtacggaatgccagtatacgtctcacagtgcaggacactaggcaagcagtctacccttggatcgttcgacgatccgatgcaagcccatgcggcatggcaacatgccaaggtagcagccatcctcgaatgtattgatctctatcagatggaggatgttcacagtgtaaacgttgttcaagcgttgcttgaaagagtggacaaacttggcaaggatattgcacagggaaaagagacaacccttttgcaatgatttgatggggtcgatggtcaaccctctgagagtgcgagaactccgccagagtaatccgatagcgaagctatcaaacgtatatgcatattccatgccaacatgtggaaagatttcacccggcagggcgggagcccgttggcattagttttgcatagcttagctgtcgctaagaaggaaagaccacggccacccattattttggatttactaaggg
